(19) United States
(12) Patent Application Publication
(10) Pub. No.: US 2017/0037479 A1
(43) Pub. Date: Feb. 9, 2017

(54) MARKERS FOR OVARIAN CANCER AND THE USES THEREOF

(71) Applicant: Agency for Science, Technology and Research, Singapore (SG)

(72) Inventors: Vladimir Kuznetsov, Singapore (SG); Anna Ivshina, Singapore (SG); Ghim Song Ow, Singapore (SG)

(21) Appl. No.: 15/302,661

(22) PCT Filed: Apr. 8, 2015
(86) PCT No.: PCT/SG2015/050066

§ 371 Date: Oct. 7, 2016

(30) Foreign Application Priority Data
Apr. 8, 2014 (SG) 10201401344W

(51) Int. Cl. C12Q 1/68

(52) U.S. Cl. CPC C12Q 1/6886; C12Q 2600/156; C12Q 2600/118; C12Q 2600/106; C12Q 2600/172; C12Q 2600/158

(57) ABSTRACT

The present invention relates to markers for high-grade serous ovarian cancer (HG-SOC) and methods and uses thereof for diagnosing high-grade serous ovarian cancer (HG-SOC) and/or determining the prognosis of a subject suffering from high-grade serous ovarian cancer (HG-SOC) by determining the presence or absence of a mutation in a CHEK2 marker or mutations of markers from a 21-gene panel comprising ADAMTSL3, ATR, CHEK2, ENAH, ERN2, GLI2, GYPB, KIAA1324L, LRRN2, MAP3K6, MAPK15, MET, MLL4, NIPBL, PCDH15, PPP1CC, PTCH1, PTK2B, RPS6KA2, RSU1 and TNC. It also relates to the use of markers CHEK2, RPS6KA2 and MLL4 in predicting the risk of developing high-grade ovarian serous ovarian cancer by determining germline mutations in at least one of these three markers.

### FIELD OF THE INVENTION

[0001] The present invention relates to biomarkers for high-grade serous ovarian cancer (HG-SOC) and methods and uses thereof for diagnosing high-grade serous ovarian cancer (HG-SOC) and/or determining the prognosis of a subject suffering from high-grade serous ovarian cancer (HG-SOC).

### BACKGROUND OF THE INVENTION

[0002] Ovarian cancer, of which high-grade serous ovarian carcinoma (HG-SOC) is the most prevalent, is one of the most lethal gynecological diseases in the world today. High-grade serous ovarian cancer (HG-SOC), a major histologic type of epithelial ovarian cancer (EOC), is a poorly characterized, heterogeneous and lethal disease where somatic mutations of TP53 are common and inherited loss of-function mutations in BRCA1/2 predispose to cancer in 9.5-13% of EOC patients (Bolton et al JAMA 2012 25; 307 (4): 832-90). However, the overall burden of disease due to either inherited or sporadic mutations is not known. Despite dramatic progress in high-throughput biotechnology and oncogenomic studies, the genetic background of this complex disease is poorly understood and the biomarkers for early detection, differential diagnostics, prognostic and disease prediction have not been implemented in clinical practices. Patients diagnosed with HG-SOC are confronted with a grim statistic that only 30% of them would survive beyond five years after initial diagnosis, even with the standard chemotherapy and radiotherapy. The reasons are likely due to high tumor heterogeneity, unknown tissue source site, asymptomatic tumor growth, late clinical detection and diagnosis, as well as high susceptibility to recurrence after primary chemotherapy.

[0003] In fact, the heterogeneity of HG-SOC tumors and the absence of reliable early detection, prognosis and predictive biomarkers, means that clinical status of the patients is varied and the tumors often respond poorly to standard therapy. Therefore, identification of high confidence molecular markers for risk assessment and risk of disease development/recurrence becomes important in various areas ranging from prophylactic to patient clinical management. Therefore, patient stratification based on their survival patterns becomes important in various areas ranging from patient clinical management, to scientific discovery of specific tumor subtypes.

[0004] Recent technological advances have facilitated the study of this complex disease, and high-grade serous ovarian carcinoma (HG-SOC) was one of the cancer diseases that have been comprehensively investigated by The Cancer Genome Atlas (TCGA) Research Network. The results of these studies showed that via expression profiling of mRNA data, patients can be classified into four biologically meaningful and distinct tumor/gene subgroups: differentiated, immunoreactive, mesenchymal or proliferative (TCGA research network Nature 2011 Vol 474; 609-15). However, survival analysis did not showed significant differences between these transcriptional sub-types in the TCGA data set. Based on meta-analysis of miRNA and mRNA expression profiles of the TCGA and several other cohorts, HG-SOC patients have been reliably categorized into three prognostic subgroups in which patient's overall survival correlates with specific pathways and treatment outcome (Tang et al. Int J Cancer. 2014; 134 (2): 306-18). Despite the concentrated research effort the information relating to a patent with HG-SOC is no better today than 10 years ago as there is no clinically approved prognostic available.

[0005] Recent mutational studies of HG-SOC of the TCGA patient cohort revealed mutated genes such as TP53, NF1, RB1, FAT3, CSMD3, GABRA6, CDK12, BRCA1, BRCA2, SMARCB1, KRAS, NRAS, CREBBP and ERBB2. Other mutations of tumor suppressor genes such as BRIP, CHEK2, MRE11A, MSH6, NBN, PALB2, RAD50 and RAD51C were also identified via massive parallel sequencing in another study. However, these and other mutations have not been systematically studied in context of their ability to provide prognosis of HG-SOC clinical outcome. Studies have showed that in HG-SOC, TP53 somatic mutations were reported in almost all HG-SOC patients and while it would be useful in areas such as early diagnosis or risk prediction of developing the disease, its application in patient survival prediction is restricted. Moreover, conventionally “driver” mutations of BRCA1 or BRCA2 were recently reported to be paradoxically associated with better patient survival relative to the wild-type variant. Typically, studies of mutational data with respect to disease etiology, diagnosis or prognosis may be faced with typical statistical issues due to the lack of appropriate and/or high quality tumor samples. The problem can be further exacerbated when mutations of a particular gene or gene variant are rare.

[0006] The effects of CHEK2 mutations in ovarian cancer patient cohorts were previously studied whereby, the missense variant of CHEK2 I157T was significantly associated with ovarian cystadenomas, borderline ovarian cancers and low-grade invasive cancers, but not high-grade ovarian cancer (Szymanska-Pasternak et al. Gynecol Oncol. 2006; 102 (3): 429-31). In another study, Baysal et al. performed single nucleotide polymorphism genotyping by pyrosequencing and identified del1100C and A252G variants of CHEK2 (Baysal et al. Gynecol Oncol. 2004; 95 (1): 62-9). However, as the statistical differences of the variant frequencies were insignificant when compared to controls, it was suggested that variations in CHEK2 are not associated with pathogenesis of ovarian cancer. In Russian ovarian cancer patients, the effects of CHEK2 1100delC on ovarian cancer pathogenesis were studied, but no associations were observed (Krylova et al. Herd Cancer Clin Pract. 2007; 5 (3): 153-56). These studies were mainly focused on screening of some well-reported variants of the CHEK2 gene, e.g. del1100C, A252G and I157T. Moreover, in these previous reports, only the association of specific variants with respect to disease pathogenesis were studied by the authors. However, the prognosis of HG-SOC patients due to the effects of CHEK2 mutations is currently unclear or insignificant.

[0007] The interconnectivity and interactions of related genes is a common feature of biological processes in either normal or tumor tissues. The many potential genes involved in the biological process or associated with prognostic significance of HG-SOC particularly those capable of patient stratification make identification of such genes a daunting task. Ovarian cancer is a highly lethal disease that accounts for more deaths than any other cancer of the female reproductive system, and ranks fifth in cancer deaths among women. In this aspect, new methods for prediction and identification of cancer risk assessment, stratification, overall survival prognosis, and therapy response prediction for patients with high-grade serous ovarian carcinoma (HG-SOC) are urgently needed.

### SUMMARY OF THE INVENTION

[0008] A first aspect of the invention relates to method for determining the prognosis of a patient afflicted by high-grade serous ovarian cancer (HG-SOC) comprising determining the presence or absence of a mutation in a gene selected from CHEK2, ERN2, ADAMTSL3, ATR, ENAH, GLI2, GYPB, KIAA1324L, LRRN2, MAP3K6, MAPK15, MET, MLL4, NIPBL, PCDH15, PPP1CC, PTCH1, PTK2B, RPS6KA2, RSU1 and TNC in a sample obtained from said patient, wherein the presence of a mutation in the ERN2gene is indicative for a favorable prognosis of the patient and the presence of a mutation in any one of the CHEK2, ADAMTSL3, ATR, ENAH, GLI2, GYPB, KIAA1324L, LRRN2, MAP3K6, MAPK15, MET, MLL4, NIPBL, PCDH15, PPP1CC, PTCH1, PTK2B, RPS6KA2, RSU1 and TNC genes is indicative for a unfavorable prognosis of the patient.

[0009] Another aspect of the invention relates to a kit for carrying out the method described herein, the kit comprising at least one nucleic acid probe complementary to mRNA of a mutated gene selected from the group consisting of CHEK2, ERN2, ADAMTSL3, ATR, ENAH, GLI2, GYPB, KIAA1324L, LRRN2, MAP3K6, MAPK15, MET, MLL4, NIPBL, PCDH15, PPP1CC, PTCH1, PTK2B, RPS6KA2, RSU1 and TNC.

[0010] Another aspect of the invention relates to a method for predicting the risk of a patient developing high-grade serous ovarian cancer (HG-SOC) comprising determining a germ line mutation in a gene selected from the group consisting of CHEK2, RPS6KA2 and MLL4 in a sample obtained from the patient.

[0011] Another aspect of the invention relates to a kit for carrying out the diagnostic method comprising at least one nucleic acid probe complementary to mRNA of a mutated gene selected from the group consisting of CHEK2, RPS6KA2 and MLL4.

[0012] Other aspects of the invention will be apparent to a person skilled in the art with reference to the following drawings and description of various non-limiting embodiments.

### BRIEF DESCRIPTION OF THE DRAWINGS

[0013] In the following description, various embodiments of the invention are described with reference to the following drawings.

[0014] FIG. 1: Mutational data of high-grade serous ovarian carcinoma (HG-SOC) downloaded from TCGA data portal.

[0015] FIG. 2: Statistical characteristics of mutations in HG-SOC genes. (A) Frequency distribution of mutations in susceptible driving genes. (B) Number of distinct mutations against number of mutated samples. Scatter plot of genes, where the vertical axis corresponds to the number of mutations across all samples and the horizontal axis corresponds to the number of samples with at least one mutation for a given gene. The diagonal represents the hypothetical scenario where number of mutations per sample for each gene is 1. Both axes are log 10-transformed.

[0016] FIG. 3: Kappa correlation of patients with CHEK2 mutations against patients with mutations in BRCA1, BRCA2, RPS6KA2 or MLL4 gene. Values in the contingency table represents the number of unique sample IDs corresponding to the row and column labels. Weighted kappa was calculated as the measure of agreement and the significance was estimated by Mantel-Haenszel (MH) test. The calculations were implemented using StatXact-9 (computed weight: quadratic difference, scores: equally spaced).

[0017] FIG. 4: Heatmap of germline, LOH or somatic mutations observed for 455 highly mutated genes (mutated in at least 5 patients) and 334 patients. The intensity of the plot corresponds to the number of mutations (inclusive of silent mutations) observed for that gene and patient.

[0018] FIG. 5: (A) Frequency of samples mutated along specific sites of the TP53 gene locus (B) mutations identified at specific sites within the various genes.

[0019] FIG. 6: (A) Extracted sub-cluster of mutation matrix belonging to 58 genes and 22 patients, arranged via hierarchical clustering (Kendall-tau distance, complete linkage). The intensity of the plot corresponds to the number of mutations (inclusive of silent mutations) observed for that gene and patient. (B) Direct interaction gene network of a subset of 21 genes identified from the mutation sub-cluster.

[0020] FIG. 7: Annotation of 58 gene symbols identified in the mutation subcluster.

[0021] FIG. 8: Enrichment analysis of the 58 genes in the mutation subcluster via (A) DAVID Bioinformatics, (B) MetaCore pathway analysis, (C) MetaCore process network analysis and (D) MetaCore disease biomarker Analysis.

[0022] FIG. 9: Association of 19 direct interacting genes with DNA-damage signaling, repair, apoptosis, cell proliferation or immune processes

[0023] FIG. 10: Consolidated CHEK2 information across clinical, copy number variation, mutation and expression datasets

[0024] FIG. 11: Kaplan-Meier survival curves of TCGA HG-SOC patients based on the non-silent mutational 706 status of (A) CHEK2, (B) TP53, (C) BRCA1 and (D) MUC16.

[0025] FIG. 12: Kappa correlation of (A) CHEK2 mutations and (B) non-silent CHEK2 mutations with therapy resistance. Values in the contingency table represents the number of unique sample IDs corresponding to the row and column labels.

[0026] FIG. 13: (A) Patient stratification of 330 TCGA HG-SOC patients based on CHEK2 copy number. (B) CHEK2 expression for samples with CHEK2 deletion, amplification or insignificant alterations. (C) Expression profiles of CHEK2 mRNA across tumor types for 378 samples. The 378 samples were from 8 fallopian tube samples and 370 HG-SOC samples with tumor grade and stage information. (D) Prognostic stratification of 358 HG-SOC patients based on CHEK2 expression data. 12 HG-SOC patients without survival times and events were excluded from the analysis. High CHEK2 mRNA expression was associated with higher-risk whereas low CHEK2 mRNA expression wad associated with lower-risk.

[0027] FIG. 14: Co-localization of TCGA mutation sites with known or predicted CHEK2 regions.

[0028] FIG. 15: (A) Genomic locus of CHEK2 from the UCSC Genome Browser. The intron-exon-UTR structure of individual isoforms are shown. (B) RNA-seq expression of the CHEK2 isoforms across 263 high-grade serous ovarian carcinoma patients from the TCGA database.

[0029] FIG. 16: (A) Locations of DNA mutations along genomic schema of the CHEK2 locus. The exon blocks are numbered sequentially from 5′ to 3′. Inverted triangles represent the locations of mutation on the exon. The numbers above the inverted triangles indicate the number of patients with the mutation (inclusive of synonymous mutations). (B) Locations of the expected mutations on the amino acid sequence. The alphabet in the inverted triangle indicates the reference amino acid residue, whereas the numbers of patients with non-synonymous mutations are shown above the inverted triangle. The numbers in the rectangular blocks indicate the amino acid residues span. (C) A representative crystal structure of the relaxed state of Chk2 protein after computational modeling and molecular dynamics simulation. All Chk2 mutations are represented by colored spheres which indicate the locations of residues corresponding to the DNA mutations after translation. The CHEK2 isoform 1 (NM_007194/NP_009125/096017) was used as the reference isoform. The forkhead-associated (FHA) domain, kinase domain and nuclear localization signal (NLS) are marked in pink, blue and cyan respectively. The Venn diagram compares the number of patients with the observed mutation at two distinct nucleotide positions. Figures are not drawn to scale.

[0030] FIG. 17: Prognostic significance of the 21 survival significant genes based on non-silent mutational status (Logrank statistic p-value ≦0.05, #mutated ≧5 and #non-mutated ≧5).

[0031] FIG. 18: (A) Venn diagram of common genes between the identified gene mutation cluster and genes whose mutation status are prognostic significant. (B) Prognostic stratification based on based on mutational status of 21-gene signature. (C) Prognostic stratification based on the mutation of the CHEK2 gene and 20-gene signature.

[0032] FIG. 19: Kappa correlation of patients classified by the 21 gene mutational signature with therapy resistance. Values in the contingency table represents the number of unique sample IDs corresponding to the row and column labels.

[0033] FIG. 20: Annotation of 21 gene symbols in the prognostic signature

[0034] FIG. 21: Enrichment analysis of the 21 survival significant genes via (A) DAVID Bioinformatics, (B) MetaCore pathway analysis, (C) MetaCore process network analysis and (D) MetaCore

[0035] FIG. 22: Cluster of non-silent mutations of the 21 prognostic genes and 58 patients in the poor prognosis subgroup for (A) germline, LOH and somatic mutations, (B) germline mutations, (C) LOH, and (D) somatic mutations. Genes and patients were ordered via hierarchical clustering (kendall-tau distance and complete linkage).

[0036] FIG. 23: Genetic and clinical characteristics of CHEK2-MLL4-RPS6KA2 determined EOC tumor sub-class (G: Germline, S: Somatic, L: LOH)

[0037] FIG. 24: (A) Key genes involved in etiology of various ovarian cancer subtypes. (B) Expression of CHEK2 mRNA across HG-SOC samples of tumor grades and stages (denoted in red boxplots). Differential expression between the normal and tumor samples were calculated via Mann-Whitney test.

### DETAILED DESCRIPTION

[0038] Integrative bioinformatics and statistical analysis of genome-wide mutational and clinical datasets of HG-SOC patients from TCGA allowed identification of prognostic genes (biomarkers) whose mutation status could stratify patients into distinct survival subgroups. Gene signatures related to poor prognosis of patients, where distinct tumor subgroups are characterized and potentially driven by germline or somatic mutations of these signature genes was also identified.

[0039] The identification of novel molecular markers for risk assessment and diseased patient stratification based on their survival patterns becomes important in various areas ranging from discovery of specific tumor classes and subtypes to improved prophylactics, early diagnostics, and clinical management.

[0040] A first aspect of the invention relates to method for determining the prognosis of a patient afflicted by high-grade serous ovarian cancer (HG-SOC) comprising determining the presence or absence of a mutation in a gene selected from CHEK2, ERN2, ADAMTSL3, ATR, ENAH, GLI2, GYPB, KIAA1324L, LRRN2, MAP3K6, MAPK15, MET, MLL4, NIPBL, PCDH15, PPP1CC, PTCH1, PTK2B, RPS6KA2, RSU1 and TNC in a sample obtained from said patient, wherein the presence of a mutation in the ERN2gene is indicative for a favorable prognosis of the patient and the presence of a mutation in any one of the CHEK2, ADAMTSL3, ATR, ENAH, GLI2, GYPB, KIAA1324L, LRRN2, MAP3K6, MAPK15, MET, MLL4, NIPBL, PCDH15, PPP1CC, PTCH1, PTK2B, RPS6KA2, RSU1 and TNC genes is indicative for a unfavorable prognosis of the patient.

[0041] These mutated genes or marker genes can be detected in tissue and/or body fluid samples, e.g., in a blood sample, and thus provide for a novel method for the prognosis of a patient afflicted by HG-SOC. As such a method does not require expensive equipment, the new method can be carried out by any physician. Preferably, the gene or marker gene is detected directly, i.e. on the DNA level, or by means of a gene product, including mRNA or a protein. Preferably, the mutations are detected via sequencing methods such as sequencing via Illumina or ABI SOLID sequencing platforms. Any suitable method such as PCT melt techniques may also be suitable for determining mutations or any other methods known in the art for determining sequence variations.

[0042] For the detection of the gene markers of the present invention specific binding partners may be employed. In some embodiments, the specific binding partners are useful to detect the presence of a marker in a sample, wherein the marker is a protein or RNA. The marker and its binding partner represent a binding pair of molecules, which interact with each other through any of a variety of molecular forces including, for example, ionic, covalent, hydrophobic, van der Waals, and hydrogen bonding. Preferably, this binding is specific. “Specific binding” means that the members of a binding pair bind preferentially to each other, i.e. usually with a significant higher affinity than to non-specific binding partners. The binding affinity for specific binding partners is thus usually at least 10-fold, preferably at least 100-fold higher than that for non-specific binding partners. The binding partners may also be specific in that they bind the mutated form of the gene product, i.e. the RNA or protein, with higher affinity than the non-mutated form, with the difference preferably being an at least 10-fold increase in affinity.

[0043] Determining the prognosis includes risk stratification and prediction of the likelihood of an adverse outcome. This can be made in relation to a certain time period. In various embodiments, the time period is 5 years. An unfavorable or adverse outcome in the sense of the present invention includes deterioration of a patient's condition, for example due to metastasis or death within the 5 years after diagnosis or determination of the prognosis, as described herein. A favorable or positive outcome includes maintenance or improvement of a patient's condition, for example due to responding positively to chemotherapy, such as cisplatin therapy, or survival for 5 years or more.

[0044] Overall, the technology can improve patient risk assessment, management and counselling, as well as provide a solution for the optimization of personalized medicine strategy of treating human ovarian cancers in a clinical setting.

[0045] In various embodiments, a mutation in the CHEK2 gene is detected. Checkpoint kinase 2 (CHEK2) encodes a nuclear serine/threonine protein kinase involved in cell cycle checkpoint control, DNA damage response signalling and apoptosis regulation. CHEK2. In the presence of DNA damage, CHEK2 phosphorylates downstream cell cycle regulators such as p53, Cdc25 and BRCA1 to activate checkpoint repair or recovery responses, as well as concurrently delay entry into mitosis. Deviation from its normal physiological function may contribute to disease pathogenesis.

[0046] In various embodiments the CHEK2 marker gene comprises a sequence as set forth in any one of SEQ ID NO. 1 (NM_001005735), or SEQ ID NO. 67 (NM_001257387), or SEQ ID NO. 68 (NM_007194), or SEQ ID NO. 69 (NM_145862). These sequences are the most common sequence known for CHEK2 and mutations or variations from these standard sequences have been demonstrated here to correlate to the poor survival of a patient afflicted by high-grade serous ovarian cancer. Aberrations of CHEK2 gene were not previously associated with prognosis of overall survival time or therapy response in HG-SOC. The relatively large and well-designed cohort of 334 HG-SOC patients allowed identification of a previously unidentified subclass of patients, with potentially very poor therapy response and overall survival (5 years overall survival rate of 0%). Where a mutation is detected in the CHEK2 marker gene, patients may be counselled on palliative care. This will save the patient the unnecessary expense and pain involved with aggressive treatment with chemotherapy.

[0047] In various embodiments, the ADAMTSL3 marker gene comprises a sequence as set forth in any one of SEQ ID NO 5 (NM_001301110) and SEQ ID NO. 71 (NM_207517).

[0048] In various embodiments, the ATR marker gene comprises a sequence as set forth in SEQ ID NO. 6 (NM_001184).

[0049] In various embodiments, the ENAH marker gene comprises a sequence as set forth in any one of SEQ ID NO. 7 (NM_001008493) and SEQ ID NO. 72 (NM_018212).

[0050] In various embodiments, the GLI2 marker gene comprises a sequence as set forth in SEQ ID NO. 8 (NM_005270).

[0051] In various embodiments, the GYPB marker gene comprises a sequence as set forth in any one of SEQ ID NO. 9 (NM_001304382) and SEQ ID NO. 73 (NM_002100).

[0052] In various embodiments, the KIAA1324L marker gene comprises a sequence as set forth in any one of SEQ ID NO. 10 (NM_001142749), SEQ ID NO. 74 (NM_001291990), SEQ ID NO. 75 (NM_001291991), and SEQ ID NO. 76 (NM_152748).

[0053] In various embodiments, the LRRN2 marker gene comprises a sequence as set forth in any one of SEQ ID NO. 11 (NM_006338) and SEQ ID NO. 77 (NM_201630).

[0054] In various embodiments, the MAP3K6 marker gene comprises a sequence as set forth in any one of SEQ ID NO. 12 (NM_001297609) and SEQ ID NO. 78 (NM_004672).

[0055] In various embodiments, the MAPK15 marker gene comprises a sequence as set forth in SEQ ID NO. 13 (NM_139021).

[0056] In various embodiments, the MET marker gene comprises a sequence as set forth in any one of SEQ ID NO. 14 (NM_000245) and SEQ ID NO. 79 (NM_001127500)

[0057] In various embodiments, the MLL4 marker gene comprises a sequence as set forth in SEQ ID NO. 4 (NM_014727). The marker may also be called KMT2B.

[0058] In various embodiments, the NIPBL marker gene comprises a sequence as set forth in any one one of SEQ ID NO. 15 (NM_015384) and SEQ ID NO. 80 (NM_133433).

[0059] In various embodiments, the PCDH15 marker gene comprises a sequence as set forth in any one of SEQ ID NO. 16 (NM_001142763), SEQ ID NO. 81 (NM_001142764), SEQ ID NO. 82 (NM_001142765), SEQ ID NO. 83 (NM_001142766), SEQ ID NO. 84 (NM_001142767), SEQ ID NO. 85 (NM_001142768), SEQ ID NO. 86 (NM_001142769), SEQ ID NO. 87 (NM_001142770), SEQ ID NO. 88 (NM_001142771), SEQ ID NO. 89 (NM_001142772), SEQ ID NO. 90 (NM_001142773), and SEQ ID NO. 91 (NM_033056).

[0060] In various embodiments, the PPP1CC marker gene comprises a sequence as set forth in any one of SEQ ID NO. 17 (NM_001244974) and SEQ ID NO. 92 (NM_002710).

[0061] In various embodiments, the PTCH1 marker gene comprises a sequence as set forth in any one of SEQ ID NO. 18 (NM_000264), SEQ ID NO. 93 (NM_001083602), SEQ ID NO. 94 (NM_001083603), SEQ ID NO. 95 (NM_001083604), SEQ ID NO. 96 (NM_001083605), SEQ ID NO. 97 (NM_001083606), and SEQ ID NO. 98 (NM_001083607).

[0062] In various embodiments, the PTK2B marker gene comprises a sequence as set forth in any one of SEQ ID NO. 19 (NM_004103), SEQ ID NO. 99 (NM_173174), SEQ ID NO. 100 (NM_173175), and SEQ ID NO. 101 (NM_173176).

[0063] In various embodiments, the RPS6KA2 marker gene comprises a sequence as set forth in any one of SEQ ID NO. 3 (NM_001006932), and SEQ ID NO. 70 (NM_021135).

[0064] In various embodiments, the RSU1 marker gene comprises a sequence as set forth in SEQ ID NO. 20 (NM_012425), and SEQ ID NO. 102 (NM_152724).

[0065] In various embodiments, the TNC marker gene comprises a sequence as set forth in SEQ ID NO. 21 (NM_002160).

[0066] All the afore-mentioned sequences are the respective wildtype sequences that can be used as a reference to detect mutations in these genes. The codes in brackets refer to their respective databank entry numbers.

[0067] In various embodiments, the mutation in the ERN2 marker gene is indicative of a favorable therapeutic outcome of the patient. In various embodiments the ERN2 marker comprises the nucleic acid sequence set forth in SEQ ID NO. 2 (NM_033266). This sequence is the most common sequence known for ERN2 and mutations or variations from this standard wildtype sequence have been demonstrated here to correlate to the better survival of a patient afflicted by high-grade serous ovarian cancer, with the overall 5 year survival rate being 37%. As ERN2 mutations correlate with better overall survival of patients, HG-SOC patients identified to have mutations in the ERN2 marker can be treated with chemotherapy and other treatments such as radiation therapy and resection.

[0068] In various embodiments, the method further comprises the step of confirming the prognosis by microscopic analysis of an ovarian tissue biopsy or by ultrasound or any other means known in the art of confirming the prognosis of ovarian cancer, particularly HG-SOC, in a patient. The ultrasound may be done externally or preferably intra-vaginally to better determine the size of any tumor growth. The method of confirming the prognosis may also include detection of mutations in known markers of ovarian cancer, preferably HG-SOC, such as mutations in TP53, BRCA1 or BRCA2. The results indicate that CHEK2 and BRCA1 are mutually exclusive mutations which may be able to stratify patients who will or will not respond well to chemotherapy. Patients with a mutation of a CHEK2 marker do typically not respond well to chemotherapy.

[0069] In various embodiments, the mutation in CHEK2 marker is located in exon 10, 11 or 15 of the CHEK2 marker. In various embodiments the terminal exon 15 of the CHEK2 gene expresses a nuclear localization sequence. CHEK2 mutations in HG-SOC patients are strong adverse indicator of patient survival prognosis and associated with therapy resistance. It is hypothesized without being limited to any theories that it could be due to mutations of the nuclear localization site which prevents the nuclear import of the protein and subsequently leads to haplo-insufficiency. In various embodiments the mutation is located at a sequence position corresponding to a codon that encodes amino acids R346, T383, R406, R519, P522, R535 and/or P536. These amino acids are present in a nuclear localization site of CHEK2.

[0070] In various embodiments, the methods of the invention can further comprise determining the presence of a mutation in one or more additional markers of those listed above. If one or more additional mutated marker genes are detected, this may increase the accuracy of the method. In certain embodiments of the methods of the invention, mutations in at least 2, 3, 4, 5, 6, 7, 8, 9, 10, 20, 30, 40, 45, 50, or 58 or more additional markers are determined.

[0071] In various embodiments, where a mutation in the CHEK2 marker is determined, the method further comprises determining a mutation in any one of the genes selected from the group consisting of ABCA3, ADAM15, ADAMTSL3, ALK, ANKHD1-EIF4EBP3, ANKMY2, ANXA7, ASPM, CDC27, CHD6, CHL1, DPYSL4, ENAH, EP400, ERBB2IP, FN1, FOXO3, GCLC, GLI2, GLI3, GYPB, GZMB, HLA-G, HNF1A, INPP5D, INSR, ITGB2, KIF3B, KIF4B, KTN1, LRRN2, MAD1L1, MAP3K6, MAPK15, MET, MKL1, MLL4, MYO5C, NUMA1, PDGFRA, PHLPP, PIK3C2B, PKP4, PLAGL2, PPARA, PRKCI, PTK2B, RAB3D, ROR2, RPS6KA2, RSU1, SPTB, TBK1, TNK2, TP53, VAV1 and ZC3H11A.

[0072] In various embodiments, the ABCA3 marker gene comprises a sequence as set forth in SEQ ID NO. 22 (NM_001089).

[0073] In various embodiments, the ADAM15 marker gene comprises a sequence as set forth in SEQ ID NO. 23 (NM_001261464), SEQ ID NO 103 (NM_001261465), SEQ ID NO. 104 (NM_001261466), SEQ ID NO. 105 (NM_003815), SEQ ID NO. 106 (NM_207191), SEQ ID NO. 107 (NM_207194), SEQ ID NO. 108 (NM_207195), SEQ ID NO. 109 (NM_207196), SEQ ID NO. 110 (NM_207197), SEQ ID NO. 111 (NR_048577), SEQ ID NO. 112 (NR_048578), and SEQ ID NO. 113 (NR_048579)

[0074] In various embodiments, the ADAMTSL3 marker gene comprises a sequence as set forth in any one of SEQ ID NO 5 (NM_001301110) and SEQ ID NO. 71 (NM_207517).

[0075] In various embodiments, the ALK marker gene comprises a sequence as set forth in SEQ ID NO. 24 (NM_004304).

[0076] In various embodiments, the ANKHD1-EIF4EBP3 marker gene comprises a sequence as set forth in SEQ ID NO. 25 (NM_020690).

[0077] In various embodiments, the ANKMY2 marker gene comprises a sequence as set forth in SEQ ID NO. 26 (NM_020319).

[0078] In various embodiments, the ANXA7 marker gene comprises a sequence as set forth in SEQ ID NO. 27 (NM_001156), and SEQ ID NO. 114 (NM_004034).

[0079] In various embodiments, the ASPM marker gene comprises a sequence as set forth in SEQ ID NO. 28 (NM_001206846), and SEQ ID NO. 115 (NM_018136).

[0080] In various embodiments, the CDC27 marker gene comprises a sequence as set forth in SEQ ID NO. 29 (NM_001114091), SEQ ID NO. 116 (NM_001256), SEQ ID NO. 117 (NM_001293089), and SEQ ID NO. 118 (NM_001293091).

[0081] In various embodiments, the CHD6 marker gene comprises a sequence as set forth in SEQ ID NO. 30 (NM_032221).

[0082] In various embodiments, the CHL1 marker gene comprises a sequence as set forth in SEQ ID NO. 31 (NM_001253387), SEQ ID NO. 119 (NM_001253388), SEQ ID NO. 120 (NM_006614), and SEQ ID NO. 121 (NR_045572).

[0083] In various embodiments, the DPYSL4 marker gene comprises a sequence as set forth in SEQ ID NO. 32 (NM_006426).

[0084] In various embodiments, the ENAH marker gene comprises a sequence as set forth in any one of SEQ ID NO. 7 (NM_001008493) and SEQ ID NO. 72 (NM_018212).

[0085] In various embodiments, the GLI2 marker gene comprises a sequence as set forth in SEQ ID NO. 8 (NM_005270).

[0086] In various embodiments, the EP400 marker gene comprises a sequence as set forth in SEQ ID NO. 33 (NM_015409).

[0087] In various embodiments, the ERBB2IP marker gene comprises a sequence as set forth in SEQ ID NO. 34 (NM_001006600), SEQ ID NO. 122 (NM_001253697), SEQ ID NO. 123 (NM_001253698), SEQ ID NO. 124 (NM_001253699), SEQ ID NO. 125 (NM_001253701), and SEQ ID NO. 126 (NM_018695).

[0088] In various embodiments, the FN1 marker gene comprises a sequence as set forth in SEQ ID NO. 35 (NM_002026), SEQ ID NO. 127 (NM_054034), SEQ ID NO. 128 (NM_212474), SEQ ID NO. 129 (NM_212476), SEQ ID NO. 130 (NM_212478), and SEQ ID NO. 131 (NM_212482)

[0089] In various embodiments, the FOXO3 marker gene comprises a sequence as set forth in SEQ ID NO. 36 (NM_001455), and SEQ ID NO. 132 (NM_201559).

[0090] In various embodiments, the GCLC marker gene comprises a sequence as set forth in SEQ ID NO. 37 (NM_001197115), and SEQ ID NO. 133 (NM_001498).

[0091] In various embodiments, the GLI3 marker gene comprises a sequence as set forth in SEQ ID NO. 38 (NM_000168).

[0092] In various embodiments, the GYPB marker gene comprises a sequence as set forth in any one of SEQ ID NO. 9 (NM_001304382) and SEQ ID NO. 73 (NM_002100).

[0093] In various embodiments, the GZMB marker gene comprises a sequence as set forth in SEQ ID NO. 39 (NM_004131).

[0094] In various embodiments, the HLA-G marker gene comprises a sequence as set forth in SEQ ID NO. 40 (NM_002127).

[0095] In various embodiments, the HNF1A marker gene comprises a sequence as set forth in SEQ ID NO. 41 (NM_000545).

[0096] In various embodiments, the INPP5D marker gene comprises a sequence as set forth in SEQ ID NO. 42 (NM_001017915), and SEQ ID NO. 134 (NM_005541).

[0097] In various embodiments, the INSR marker gene comprises a sequence as set forth in SEQ ID NO. 43 (NM_000208), and SEQ ID NO. 135 (NM_001079817).

[0098] In various embodiments, the ITGB2 marker gene comprises a sequence as set forth in SEQ ID NO. 44 (NM_000211), SEQ ID NO. 136 (NM_001127491), and SEQ ID NO. 137 (NM_001303238).

[0099] In various embodiments, the KIF3B marker gene comprises a sequence as set forth in SEQ ID NO. 45 (NM_004798).

[0100] In various embodiments, the KIF4B marker gene comprises a sequence as set forth in SEQ ID NO. 46 (NM_001099293).

[0101] In various embodiments, the KTN1 marker gene comprises a sequence as set forth in SEQ ID NO. 47 (NM_001079521), SEQ ID NO. 138 (NM_001079522), SEQ ID NO. 139 (NM_001271014), SEQ ID NO. 140 (NM_004986), SEQ ID NO. 141 (NR_073128), and SEQ ID NO. 142 (NR_073129).

[0102] In various embodiments, the LRRN2 marker gene comprises a sequence as set forth in any one of SEQ ID NO. 11 (NM_006338) and SEQ ID NO. 77 (NM_201630).

[0103] In various embodiments, the MAD1L1 marker gene comprises a sequence as set forth in SEQ ID NO. 48 (NM_001013836), SEQ ID NO. 143 (NM_001013837), SEQ ID NO. 144 (NM_001304523), SEQ ID NO. 145 (NM_001304524), SEQ ID NO. 146 (NM_001304525), and SEQ ID NO. 147 (NM_003550).

[0104] In various embodiments, the MAP3K6 marker gene comprises a sequence as set forth in any one of SEQ ID NO. 12 (NM_001297609) and SEQ ID NO. 78 (NM_004672).

[0105] In various embodiments, the MAPK15 marker gene comprises a sequence as set forth in SEQ ID NO. 13 (NM_139021).

[0106] In various embodiments, the MET marker gene comprises a sequence as set forth in any one of SEQ ID NO. 14 (NM_000245) and SEQ ID NO. 79 (NM_001127500)

[0107] In various embodiments, the MKL1 marker gene comprises a sequence as set forth in SEQ ID NO. 49 (NM_001282660), SEQ ID NO. 148 (NM_001282661), SEQ

[0108] ID NO. 149 (NM_001282662), and SEQ ID NO. 150 (NM_020831)

[0109] In various embodiments, the MLL4 marker gene comprises a sequence as set forth in SEQ ID NO. 4 (NM_014727). The gene may also be called KMT2B.

[0110] In various embodiments, the MYO5C marker gene comprises a sequence as set forth in SEQ ID NO. 50 (NM_018728).

[0111] In various embodiments, the NUMA1 marker gene comprises a sequence as set forth in SEQ ID NO. 51 (NM_001286561), SEQ ID NO. 151 (NM_006185), and SEQ ID NO. 152 (NR_104476).

[0112] In various embodiments, the PDGFRA marker gene comprises a sequence as set forth in SEQ ID NO. 52 (NM_006206).

[0113] In various embodiments, the PHLPP marker gene comprises a sequence as set forth in SEQ ID NO. 53 (NM_194449). The gene may also be called PHLPP1.

[0114] In various embodiments, the PIK3C2B marker gene comprises a sequence as set forth in SEQ ID NO. 54 (NM_002646).

[0115] In various embodiments, the PKP4 marker gene comprises a sequence as set forth in SEQ ID NO. 55 (NM_001005476), SEQ ID NO. 153 (NM_001304969), SEQ ID NO. 154 (NM_001304970), SEQ ID NO. 155 (NM_001304971), and SEQ ID NO. 156 (NM_003628).

[0116] In various embodiments, the PLAGL2 marker gene comprises a sequence as set forth in SEQ ID NO. 56 (NM_002657).

[0117] In various embodiments, the PPARA marker gene comprises a sequence as set forth in SEQ ID NO. 57 (NM_001001928), SEQ ID NO. 157 (NM_005036)

[0118] In various embodiments, the PRKCI marker gene comprises a sequence as set forth in SEQ ID NO. 58 (NM_002740).

[0119] In various embodiments, the PTK2B marker gene comprises a sequence as set forth in any one of SEQ ID NO. 19 (NM_004103), SEQ ID NO. 99 (NM_173174), SEQ ID NO. 100 (NM_173175), and SEQ ID NO. 101 (NM_173176).

[0120] In various embodiments, the RAB3D marker gene comprises a sequence as set forth in SEQ ID NO. 59 (NM_004283).

[0121] In various embodiments, the ROR2 marker gene comprises a sequence as set forth in SEQ ID NO. 60 (NM_004560).

[0122] In various embodiments, the RPS6KA2 marker gene comprises a sequence as set forth in any one of SEQ ID NO. 3 (NM_001006932), and SEQ ID NO. 70 (NM_021135).

[0123] In various embodiments, the RSU1 marker gene comprises a sequence as set forth in SEQ ID NO. 20 (NM_012425), and SEQ ID NO. 102 (NM_152724).

[0124] In various embodiments, the SPTB marker gene comprises a sequence as set forth in SEQ ID NO. 61 (NM_000347), and SEQ ID NO. 158 (NM_001024858).

[0125] In various embodiments, the TBK1 marker gene comprises a sequence as set forth in SEQ ID NO. 62 (NM_013254).

[0126] In various embodiments, the TNK2 marker gene comprises a sequence as set forth in SEQ ID NO. 63 (NM_001010938), and SEQ ID NO. 159 (NM_005781).

[0127] In various embodiments, the TP53 marker gene comprises a sequence as set forth in SEQ ID NO. 64 (NM_000546), SEQ ID NO. 160 (NM_001126112), SEQ ID NO. 161 (NM_001126113), SEQ ID NO. 162 (NM_001126114), SEQ ID NO. 163 (NM_001126115), SEQ ID NO. 164 (NM_001126116), SEQ ID NO. 165 (NM_001126117), SEQ ID NO. 166 (NM_001126118), SEQ ID NO. 167 (NM_001276695), SEQ ID NO. 168 (NM_001276696), SEQ ID NO. 169 (NM_001276697), SEQ ID NO. 170 (NM_001276698), SEQ ID NO. 171 (NM_001276699), SEQ ID NO. 172 (NM_001276760), and SEQ ID NO. 173 (NM_001276761).

[0128] In various embodiments, the VAV1 marker gene comprises a sequence as set forth in SEQ ID NO. 65 (NM_001258206), SEQ ID NO. 174 (NM_001258207), and SEQ ID NO175 (NM_005428).

[0129] In various embodiments, the ZC3H11A marker gene comprises a sequence as set forth in SEQ ID NO. 66 (NM_014827).

[0130] All the afore-mentioned sequences are the respective wildtype sequences that can be used as a reference to detect mutations in these genes. The codes in brackets refer to their respective databank entry numbers.

[0131] In various embodiments, determining the presence or absence of a mutation in any one of a panel of marker genes comprises detecting the presence or absence of a mutation of a nucleotide sequence selected from the group consisting of the nucleic acid sequences set forth in SEQ ID NOS 3-5, 7-9, 11-14, 19, 20, 22-73, 77-79 99-175.

[0132] In various embodiments, where a mutation in the CHEK2 marker is determined, the method further comprises determining a mutation in any one of the genes selected from the group consisting of ADAMTSL3, ATR, ENAH, ERN2, GLI2, GYPB, KIAA1324L, LRRN2, MAP3K6, MAPK15, MET, MLL4, NIPBL, PCDH15, PPP1CC, PTCH1, PTK2B, RPS6KA2, RSU1 and TNC. In some embodiments, mutations in at least 2, 3, 4, 5, 6, 7, 8, 9, 10, 11, 12, 13, 14, 15, 16, 17, 18, 19 or all 20 genes are additionally determined.

[0133] In various embodiments, the method further comprises determining the presence of a mutations in each of the following markers ADAMTSL3, ATR, CHEK2, ENAH, GLI2, GYPB, KIAA1324L, LRRN2, MAP3K6, MAPK15, MET, MLL4, NIPBL, PCDH15, PPP1CC, PTCH1, PTK2B, RPS6KA2, RSU1 and TNC. The detection of any mutations in any of the afore-mentioned genes is indicative of a unfavorable therapeutic outcome of the patient. In various embodiments the markers comprise nucleic acid sequences set forth in SEQ ID NOS. 3-21, or 70-102. Mutations in any one of the above-mentioned markers correlate with poorer overall survival of patients.

[0134] In various embodiments, the method further comprises determining a mutation in any one of a marker sequence selected from the group consisting of nucleic acid sequences set forth in SEQ ID NOS. 1, 3-21 and 67-102.

[0135] In various embodiments, the method comprises determining the presence or absence of a mutation in a panel of gene markers comprising any two or more, three or more, four or more, five or more, six or more, seven or more, eight, or more, nine or more, ten or more, eleven or more, twelve or more, thirteen or more, fourteen or more, fifteen or more, sixteen or more, seventeen or more, eighteen or more, nineteen or more, twenty or more or all 21 of CHEK2, ERN2, ADAMTSL3, ATR, ENAH, GLI2, GYPB, KIAA1324L, LRRN2, MAP3K6, MAPK15, MET, MLL4, NIPBL, PCDH15, PPP1CC, PTCH1, PTK2B, RPS6KA2, RSU1 and TNC. In this embodiment the combined mutational panel or signature comprising 21 genes (DNA and/or mRNA and/or protein) may be used to stratify a cohort of patients into low and high-risk subgroups. HG-SOC patients are classified as low-risk if mutations are observed in ERN2 or no mutations are observed in ADAMTSL3, ATR, CHEK2, ENAH, GLI2, GYPB, KIAA1324L, LRRN2, MAP3K6, MAPK15, MET, MLL4, NIPBL, PCDH15, PPP1CC, PTCH1, PTK2B, RPS6KA2, RSU1 and TNC. HG-SOC patients are classified as high-risk if mutations are not observed in ERN2 and mutations are observed in ADAMTSL3, ATR, CHEK2, ENAH, GLI2, GYPB, KIAA1324L, LRRN2, MAP3K6, MAPK15, MET, MLL4, NIPBL, PCDH15, PPP1CC, PTCH1, PTK2B, RPS6KA2, RSU1 and TNC. In various embodiments, the method may comprises determining the presence of a mutation in a panel of markers comprising the non-mutated sequences as set forth in SEQ ID NOS 1-21.

[0136] In various embodiments, the method comprises determining a mutation in a panel of markers comprising ADAMTSL3, ATR, CHEK2, ENAH, GLI2, GYPB, KIAA1324L, LRRN2, MAP3K6, MAPK15, MET, MLL4, NIPBL, PCDH15, PPP1CC, PTCH1, PTK2B, RPS6KA2, RSU1 and TNC wherein a mutation in any one of the panel of gene markers is indicative of an unfavorable therapeutic outcome of the patient. In various embodiments, the method comprises determining the presence or absence of a mutation in a panel of marker having the wildtype sequences set forth in SEQ ID NOS. 1, and 3-21, with the presence of a mutation being indicative for said the subject having an unfavorable prognosis. HG-SOC patients are classified as high-risk if mutations are not observed in ERN2 and mutations are observed in ADAMTSL3, ATR, CHEK2, ENAH, GLI2, GYPB, KIAA1324L, LRRN2, MAP3K6, MAPK15, MET, MLL4, NIPBL, PCDH15, PPP1CC, PTCH1, PTK2B, RPS6KA2, RSU1 and TNC.

[0137] In various embodiments a first tumor subtype is determined by a germ line mutation in CHEK2, RPS6KA2 and/or MLL4 marker. In various embodiments a first tumor subtype is determined by detection of the presence of a germ line mutation in a nucleic acid sequence as set forth in any one of SEQ ID NOS 1, 3 and/or 4, with said sequences corresponding to the respective wildtype sequences.

[0138] In various embodiments the wildtype sequences for CHEK2 marker gene comprises a sequence as set forth in any one of SEQ ID NO. 1 (NM_001005735), or SEQ ID NO. 67 (NM_001257387), or SEQ ID NO. 68 (NM_007194), or SEQ ID NO. 69 (NM_145862). The wildtype sequences for RPS6KA2 marker gene comprises a sequence as set forth in any one of SEQ ID NO. 3 (NM_001006932), and SEQ ID NO. 70 (NM_021135). The wildtype sequences for MLL4 marker gene comprises a sequence as set forth in SEQ ID NO. 4 (NM_014727). The gene may also be called KMT2B.

[0139] In various embodiments, the method comprises determining the presence or absence of a mutation in a panel of gene markers comprising CHEK2, ABCA3, ADAM15, ADAMTSL3, ALK, ANKHD1-EIF4EBP3, ANKMY2, ANXA7, ASPM, CDC27, CHD6, CHEK2, CHL1, DPYSL4, ENAH, EP400, ERBB2IP, FN1, FOXO3, GCLC, GLI2, GLI3, GYPB, GZMB, HLA-G, HNF1A, INPP5D, INSR, ITGB2, KIF3B, KIF4B, KTN1, LRRN2, MAD1L1, MAP3K6, MAPK15, MET, MKL1, MLL4, MYO5C, NUMA1, PDGFRA, PHLPP, PIK3C2B, PKP4, PLAGL2, PPARA, PRKCI, PTK2B, RAB3D, ROR2, RPS6KA2, RSU1, SPTB, TBK1, TNK2, TP53, VAV1 and ZC3H11A. In this embodiment, the combined mutational panel or signature comprises 58 genes which are relatively often mutated in 7% of HG-SOC patients. This panel may be used to identify HG-SOC patients having a poor prognosis. In various embodiments, the method comprises determining the presence or absence of a mutation in a panel of gene markers comprises detecting the presence or absence of a mutation in any one or more of the nucleotide sequences set forth in SEQ ID NOS 3-5, 7-9, 11-14, 19, 20, 22-73, 77-79 99-175.

[0140] In various embodiments the mutations identified that can be used for the prognosis are listed in FIG. 5 in relation to their chromosome site location. A person skilled in the art can easily obtain the specific mutation based on this information using standard software such as d-chip software or others available.

[0141] Another aspect of the invention relates to a kit for carrying out the method described herein, the kit comprising at least one detection reagent capable of detecting a mutation, such as a nucleic acid probe complementary to wildtype or mutated mRNA or primers that allow amplification and then sequencing of the amplified sequences or primers that allow direct sequencing, in any one of the ABCA3, ADAM15, ADAMTSL3, ALK, ANKHD1-EIF4EBP3, ANKMY2, ANXA7, ASPM, CDC27, CHD6, CHL1, DPY5L4, ENAH, EP400, ERBB2IP, FN1, FOXO3, GCLC, GLI2, GLI3, GYPB, GZMB, HLA-G, HNF1A, INPP5D, INSR, ITGB2, KIF3B, KIF4B, KTN1, LRRN2, MAD1L1, MAP3K6, MAPK15, MET, MKL1, MLL4, MYO5C, NUMA1, PDGFRA, PHLPP, PIK3C2B, PKP4, PLAGL2, PPARA, PRKCI, PTK2B, RAB3D, ROR2, RPS6KA2, RSU1, SPTB, TBK1, TNK2, TP53, VAV1 and ZC3H11A marker genes.

[0142] The mutations in said marker genes are those that have been described above in relation to the inventive methods and and detection of them can be made by standard sequencing methods.

[0143] In various embodiments the detection reagent is a nucleic acid probe being complementary to wildtype mRNA of any one of the sequences set forth in SEQ ID NOS. 1-21 and 67-102.

[0144] In various embodiments, the kit comprises at least one nucleic acid probe complementary to mRNA of any one of ABCA3, ADAM15, ADAMTSL3, ALK, ANKHD1-EIF4EBP3, ANKMY2, ANXA7, ASPM, CDC27, CHD6, CHL1, DPYSL4, ENAH, EP400, ERBB2IP, FN1, FOXO3, GCLC, GLI2, GLI3, GYPB, GZMB, HLA-G, HNF1A, INPP5D, INSR, ITGB2, KIF3B, KIF4B, KTN1, LRRN2, MAD1L1, MAP3K6, MAPK15, MET, MKL1, MLL4, MYO5C, NUMA1, PDGFRA, PHLPP, PIK3C2B, PKP4, PLAGL2, PPARA, PRKCI, PTK2B, RAB3D, ROR2, RPS6KA2, RSU1, SPTB, TBK1, TNK2, TP53, VAV1 and ZC3H11A marker genes.

[0145] In various embodiments, the kit comprises a panel of nucleic acid probes complementary to mRNA of ADAMTSL3, ATR, ENAH, GLI2, GYPB, KIAA1324L, LRRN2, MAP3K6, MAPK15, MET, MLL4, NIPBL, PCDH15, PPP1CC, PTCH1, PTK2B, RPS6KA2, RSU1 and TNC marker genes.

[0146] In various embodiments, the kit comprises at least one nucleic acid probe complementary to mRNA of any one of marker gene sequences set forth in SEQ ID NOS 1-175, and optionally written instructions for: extracting nucleic acid from the sample of the patient and hybridizing the nucleic acid to a DNA microarray; and obtaining the prognosis of overall survival or prediction of therapeutic outcome for the patient.

[0147] In various embodiments the kit comprises a panel of nucleic acid probes complementary to mRNA of the marker gene sequences as set forth in SEQ ID NOS 1-21, 67-102.

[0148] In various embodiments, the kit further comprises at least one nucleic acid probe complementary to mRNA of any one of the marker gene sequences as set forth in SEQ ID NOS 3-5, 7-9, 11-14, 19, 20, 22-73, 77-79 and 99-175.

[0149] In various embodiments, the probes are able to detect mutations in the markers. This may be achieved using probes that are complementary to the markers whereby when they are used with a PCR melt technique the hybridization affinity between the mutant and the probe is less than the hybridization affinity between the standard nucleic acid and the probe at higher temperatures whereby a mutation can be identified. Alternative probes may include the mutation, otherwise being substantially complementary to the wildtype mRNA of any one of marker sequences.

[0150] In various embodiments, the kit comprises a panel of nucleic acid probes complementary to mRNA of ABCA3, ADAM15, ADAMTSL3, ALK, ANKHD1-EIF4EBP3, ANKMY2, ANXA7, ASPM, CDC27, CHD6, CHL1, DPYSL4, ENAH, EP400, ERBB2IP, FN1, FOXO3, GCLC, GLI2, GLI3, GYPB, GZMB, HLA-G, HNF1A, INPP5D, INSR, ITGB2, KIF3B, KIF4B, KTN1, LRRN2, MAD1L1, MAP3K6, MAPK15, MET, MKL1, MLL4, MYO5C, NUMA1, PDGFRA, PHLPP, PIK3C2B, PKP4, PLAGL2, PPARA, PRKCI, PTK2B, RAB3D, ROR2, RPS6KA2, RSU1, SPTB, TBK1, TNK2, TP53, VAV1 and ZC3H11A marker genes.

[0151] In various embodiments, the kit comprising a panel of nucleic acid probes complementary to mRNA of marker sequences as set forth in SEQ ID NOS 1, 3-5, 7-9, 11-14 19, 20 and 22-69.

[0152] Another aspect of the invention relates to a method for predicting the risk of a patient developing high-grade serous ovarian cancer (HG-SOC) comprising determining the presence or absence of a germ line mutation in a gene selected from CHEK2, RPS6KA2 and MLL4 in a sample obtained from said patient, wherein the presence of a mutation in the CHEK2, RPS6KA2 and/or MLL4 gene is indicative of the patient developing HG-SOC.

[0153] In various embodiments of the invention, the mutation in the one or more marker genes is detected by analyzing a sample obtained from the patient. The sample typically contains nucleic acid, and may, for example, be a body fluid, cell or tissue sample. Body fluids comprise, but are not limited to blood, blood plasma, blood serum, cerebrospinal fluid, cerumen (earwax), endolymph and perilymph, gastric juice, mucus (including nasal drainage and phlegm), peritoneal fluid, pleural fluid, saliva, sebum (skin oil), semen, sweat, tears, vaginal secretion, nipple aspirate fluid, vomit and urine. In certain embodiments of the methods detailed above, the body fluid is selected from the group consisting of blood, serum, plasma, urine, and saliva. The tissue sample may be ovary tissue and the cell sample may comprise cells from ovary or fallopian tissue.

[0154] The present technology also encompasses the use of germline mutations of CHEK2 and/or RPS6KA2 and/or MLL4 genes (DNA and/or mRNA and/or protein) as risk factors in predicting healthy women's risk of HG-SOC initiation and development.

[0155] In various embodiments, the germ line mutation is indicative for an increased risk of said patient developing HG-SOC.

[0156] In various embodiments the germ line mutations identified that can be used for the diagnosis are listed in FIG. 23.

[0157] As mentioned herein the methods of diagnosis may improve efforts to identify women at high risk of the hereditary and somatic mutations of ovarian cancers distinct from those which are associated with p53 somatic mutations and germline BRAC1/BRAC2 mutations.

[0158] Another aspect of the invention relates to a kit for carrying out the method of diagnosis, the kit comprising at least one nucleic acid probe complementary to mRNA of any one of CHEK2, RPS6KA2 and MLL4 markers

[0159] In various embodiments the nucleic acid probe complementary to mRNA comprises marker sequences complementary to mRNA any one of nucleic acid sequences set forth in SEQ ID NOS 1, 3, and/or 4 and optionally written instructions for: extracting nucleic acid from the sample of the patient and hybridizing the nucleic acid to a DNA microarray; and obtaining the risk of said patient developing HG-SOC.

[0160] It should be understood that all embodiments disclosed above in relation to the methods or uses of the invention, are similarly applicable to each method and use and vice versa.

[0161] As already described above, the importance of biomarkers and the technical advantage of the quantitative method holds great promise for understanding the etiology, pathophysiology, and more importantly, prognosis and diagnosis of subjects afflicted by HG-SOC particularly, with respect to patient survival events and times.

[0162] The present technology includes methods that (i) identify mutation of CHEK2 gene (DNA and/or mRNA and/or protein) as an important risk and poor prognostic factor for patients with HG-SOC, (ii) identify a combined mutational signature comprising 58 relatively often mutated genes in 7% of HG-SOC, that identify HG-SOC patients significantly associated with poor prognosis, (iii) identify a combined mutational signature comprising 21 genes (DNA and/or mRNA and/or protein) that significantly stratifies a cohort of patients into low and high-risk subgroups, and (iv) using either the CHEK2 gene (DNA and/or mRNA and/or protein) or the 58-gene signature (DNA and/or mRNA and/or protein) or the 21-gene signature (DNA and/or mRNA and/or protein) as an obligatory prognostic tool in the overall survival and treatment outcome prediction of individual HG-SOC patients in a clinical setting.

[0163] Genes comprised in the 58-gene and 21-gene mutational signatures are associated with functions such as kinase activity and ATP-binding, and they are also enriched in biological processes such as cell-cycle regulation, apoptotic control and DNA damage repair. The use of these gene mutational signatures significantly stratifies diagnosed HG-SOC patients into low and high-risk subgroups. Specifically, the 21-gene mutational signature provides stratification of the patients onto two disease development risk groups with their 5 year overall survival rates as 37% and 6%, respectively. Furthermore, the tumors in high-risk subgroup are about twice as likely to present resistance to therapy (15% of high-risk subgroup and 8.7% of low-risk subgroup).

[0164] CHEK2 mutations in HG-SOC patients are strong adverse indicator of patient survival prognosis and associated with therapy resistance. It is hypothesize without being limited to any theories that it could be due to mutations of the nuclear localization site which prevents the nuclear import of the protein and subsequently leads to haploinsufficiency. 21-gene mutational signature was also identified which highly correlates with patient's survival patterns (p=7.311e-08). Among these genes, protein functions such as kinase activity or ATP-binding are enriched, which possibly indicate that these processes play crucial roles in carcinogenesis and targeting these processes might be an attractive therapeutic strategy to restore the imbalance in dysregulated cell proliferation associated with the higher risk subgroups.

[0165] Two sub-classes of HG-SOC were characterized via either germline mutations of CHEK2, RPS6KA2 and MLL4 or somatic mutations of the other signature genes. The presence of a subset of tumors characterized via germline mutations or/and loss-of heterozygosity (LOH) of CHEK2 provides potential screening efforts to identify women with high-risk of developing HG-SOC.

[0166] Mutation counts across 9083 gene symbols and 334 tumor tissue samples from patients diagnosed with HG-SOC were analyzed. Expectedly, TP53 whose mutations are known to be one of the defining characteristic of HG-SOC, were found to be highly mutated across all samples. However, the frequency of TP53 mutations in each tumor sample was low, averaging about one TP53 per tumor sample. In contrast, CHEK2 and BRCA1 genes (which are involved in DNA damage repair) are mutated in high frequency in a small subset of patients.

[0167] Further unsupervised hierarchical clustering revealed a highly mutated cluster of 58 genes and 22 patients (from 334 HG-SOC) mainly characterized by CHEK2 mutations. Gene ontology and network analysis revealed that these genes are associated with kinase and ATP-binding, and could be involved in biological processes related to cell cycle, DNA damage repair, apoptosis or immune response. The cluster of 58 genes are: ABCA3, ADAM15, ADAMTSL3, ALK, ANKHD1-EIF4EBP3, ANKMY2, ANXA7, ASPM, CDC27, CHD6, CHEK2, CHL1, DPYSL4, ENAH, EP400, ERBB2IP, FN1, FOXO3, GCLC, GLI2, GLI3, GYPB, GZMB, HLA-G, HNF1A, INPP5D, INSR, ITGB2, KIF3B, KIF4B, KTN1, LRRN2, MAD1L1, MAP3K6, MAPK15, MET, MKL1, MLL4, MYO5C, NUMA1, PDGFRA, PHLPP, PIK3C2B, PKP4, PLAGL2, PPARA, PRKCI, PTK2B, RAB3D, ROR2, RPS6KA2, RSU1, SPTB, TBK1, TNK2, TP53, VAV1 and ZC3H11A.

[0168] The prognostic significance of the mutational status of the genes most highly mutated (in at least 5 patients) was assessed. 21 genes whose mutational status could independently and significantly stratify patients into low or high-risk (p-value≦0.05) were identified. These 21 genes are: ADAMTSL3, ATR, CHEK2, ENAH, ERN2, GLI2, GYPB, KIAA1324L, LRRN2, MAP3K6, MAPK15, MET, MLL4, NIPBL, PCDH15, PPP1CC, PTCH1, PTK2B, RPS6KA2, RSU1 and TNC. Apart from ERN2 whose mutational status correlates with better overall survival, the other 20 genes have mutations that correlate with poorer overall survival. These genes are highly enriched in kinase activity and ATP-binding functions. They are also significantly enriched in pathways or gene networks of DNA damage and repair, apoptosis, and cell cycle.

[0169] A combined 21-gene mutational signature was subsequently composed where HG-SOC patients are classified into:

[0170] low-risk if mutations are observed in ERN2 and/or no mutations are observed in ADAMTSL3, ATR, CHEK2, ENAH, GLI2, GYPB, KIAA1324L, LRRN2, MAP3K6, MAPK15, MET, MLL4, NIPBL, PCDH15, PPP1CC, PTCH1, PTK2B, RPS6KA2, RSU1 and TNC.

[0171] high-risk if mutations are observed in ADAMTSL3, ATR, CHEK2, ENAH, GLI2, GYPB, KIAA1324L, LRRN2, MAP3K6, MAPK15, MET, MLL4, NIPBL, PCDH15, PPP1CC, PTCH1, PTK2B, RPS6KA2, RSU1 and TNC and/or mutations are not observed in ERN2.

[0172] Further analysis of the patients in the 58 high-risk patient subgroup defined by the 21-gene mutational signature revealed two distinct cluster of patients characterized by two different tumor subtypes. The first tumor subtype is characterized by germline mutations of CHEK2, RPS6KA2 and MLL4 whereas the second tumor subtype is characterized by spontaneous somatic mutations of the other genes. The results also revealed two possible disease etiology pathways in the presence of TP53 that typically characterize HG-SOC tumors. The screening of CHEK2, RPS6KA2 and MLL4 for genetic variants may be useful as risk factors in predicting a healthy woman's risk to developing the disease.

[0173] The gene mutational signatures can lend itself to potential applications in a clinical setting for early diagnosis of ovarian cancer as well as prognosis of therapy effectiveness and overall survival. The invention can also be used to identify subclass of tumors that are unlikely to respond well to chemotherapy and hence, provide scientists with a tool to develop new clinical strategies to target this tumor subclass. The gene mutational signatures can be formed into a diagnostic or prognostic kit to be used in the laboratory or in a clinical setting.

[0174] CHEK2 mutations were observed to be highly associated with poor response to chemotherapy and consequently, poor overall survival where 0% of high-grade serous ovarian carcinoma (HG-SOC) patients with CHEK2 mutations survive beyond 5 years. This subclass of patients with CHEK2 mutation constitutes about 7.2% of all HG-SOC patients. This allows identification of a previously unidentified subclass of patients diagnosed with high-grade serous ovarian carcinoma (HG-SOC). New lines of therapy or clinical management for this subclass of patients are urgently required as their tumors do not respond well to therapy. Therefore, this implies a necessity of identifying this subclass of HG-SOC patients, to provide better clinical care to this group of patient, and to study this subclass of tumors to derive future personalized clinical therapeutic benefit in future.

[0175] In addition to treating high grade and high stage serous ovarian cancer, detection of such cancer at the earliest stage could also be beneficial to the patient in terms of clinical intervention. Measuring the CHEK2 expression level to provide early diagnosis of ovarian cancer can help address such needs.

[0176] By “comprising” it is meant including, but not limited to, whatever follows the word “comprising”. Thus, use of the term “comprising” indicates that the listed elements are required or mandatory, but that other elements are optional and may or may not be present.

[0177] By “consisting of” is meant including, and limited to, whatever follows the phrase “consisting of”. Thus, the phrase “consisting of” indicates that the listed elements are required or mandatory, and that no other elements may be present.

[0178] The inventions illustratively described herein may suitably be practiced in the absence of any element or elements, limitation or limitations, not specifically disclosed herein. Thus, for example, the terms “comprising”, “including”, “containing”, etc. shall be read expansively and without limitation. Additionally, the terms and expressions employed herein have been used as terms of description and not of limitation, and there is no intention in the use of such terms and expressions of excluding any equivalents of the features shown and described or portions thereof, but it is recognized that various modifications are possible within the scope of the invention claimed. Thus, it should be understood that although the present invention has been specifically disclosed by preferred embodiments and optional features, modification and variation of the inventions embodied therein herein disclosed may be resorted to by those skilled in the art, and that such modifications and variations are considered to be within the scope of this invention.

[0179] The invention has been described broadly and generically herein. Each of the narrower species and sub-generic groupings falling within the generic disclosure also form part of the invention. This includes the generic description of the invention with a proviso or negative limitation removing any subject matter from the genus, regardless of whether or not the excised material is specifically recited herein.

[0180] Other embodiments are within the following claims and non-limiting examples.

### Examples

### Genome-Wide Mutational Spectrum and Statistical Distribution of Gene Mutations

[0181] Exome sequencing via Illumina or ABI SOLID sequencing platforms was performed for 334 HG-SOC tumor samples at the Human Genome Sequencing Centers (HGSCs): Baylor College of Medicine (BCM), Broad Institute Genome Center (BI) and Genome Institute at Washington University (WUSM). The data was analysed by the TCGA research network as previously described (TCGA research network Nature 2011 Vol 474; 609-15). The processed mutational data was downloaded from the TCGA data portal for further analysis.

[0182] The TCGA data portal contains 21,978 mutations across all studied genes and patients. The genes whose mutational status was unknown were removed, and the remaining 17,639 mutations comprised of germline, LOH or somatic mutations across 334 patients and 9083 unique gene symbols (FIG. 1). These mutations encompassed all variants including deletion, insertion, missense mutations, or silent mutations of germline, somatic or loss-of heterozygosity (LOH) origins. The analysis included silent mutations, assuming that they could be conditional pathogenic mutations, specifically in context of DNA damage induced by common endogenous mutators (AID/APOBEC cytidine deaminases), regulatory signalling, modification of RNA-protein binding, post transcriptional events and cytosol-nuclear transport.

[0183] To provide genome-wide understanding of the relative frequency of occurrence of mutations within a gene and the relative frequency of gene mutations across the patient samples, A two-dimensional association matrix was first generated where the rows and columns correspond to 9083 unique gene symbols and 334 unique tumor sample IDs respectively (data not shown). The integer values in each cell of the matrix represent the number of unique mutation sites for each gene and each tumor sample ID. Frequency analysis of the mutated gene of this table demonstrated that all of the 23 mutated genes reported in previous TCGA studies were included in the subset of mutated genes, if two mutations are considered as a confidence threshold.

[0184] Subsequently for each gene, the number of tumor samples with reported mutation in this gene was calculated, as well as the total number of mutation events across all samples. The frequency distribution function of the number of tumor samples that are distributed across studied individual genes (N=9083) is shown in FIG. 2A. This figure shows examples of mutated genes with low, moderate and high frequency in the HG-SOC samples. In particular, FIG. 2A shows the relative high frequencies of tumor samples having mutations in BRCA1 (40 of 334 tumor samples) or BRCA2 (23 of 334 tumor samples) genes in the TCGA patient cohort. In contrast, mutations in DNA mismatch repair genes MLH1, MSH2, MSH6, PMS1 and PMS2 occurred in much fewer patients (1, 1, 4, 2 and 1 out of 334 patients, respectively). These genes are commonly associated with Lynch syndrome and accounts for a subset of hereditary ovarian cancers.

[0185] The frequency distribution is skewed with a long right tail, representative of observations that few genes are highly mutated whereas many other genes are less mutated in HG-SOC tumor samples. Such probability function belongs to a family of skewed distributions, which are observed often in many evolving and interactive (interconnecting) systems in which the birth-death process are occurring and driving a system by evolution towards the complexity and self-organization (see Methods). In such models, the skewed form of the function is strongly population/sample size and scale-dependent. In the context of cancer driving mutations, Kolmogorov-Waring (KW) model allows us to better understand the nature of enormous variability and plasticity of mutation events and a role of common and rare mutations in cancer origin and its progression. In practical sense, K-W model allows estimation of a fraction of the mutated genes which could be observed if the numbers of mutated tumour samples are increased. In this case, the best-fitted K-W function yields the following parameters:

$$a = 3.944 ; b = 9.50 ; θ = 0.867 and Po = ( 1 - \frac{a}{b} ) = 0.31$$

[0186] Thus, the total number of susceptible target genes Nₛ could be estimated by the formula:

Nₛ=Nb/a=9083×9.5/3.944=21887 genes.

[0187] This result suggests that the expected number of potential target genes for mutagenesis would include the entire set of protein-coding genes in humans. As the data only revealed 9083 mutated genes, the discrepancies could be false negatives and could be improved via increasing sample sizes or improvement of technology

[0188] Also, a scatter plot was generated where each point represents each gene and the axes represent the number of patient tumor samples with at least one mutation in that gene against the number of total mutation sites for the gene across all samples (FIG. 2B). The diagonal line represents a hypothetical situation where each gene is mutated exactly once per sample, if any at all. Our results indicated that while TP53 is the most highly mutated gene and was observed in almost all HG-SOC patients, the number of mutations with the gene locus in each patient sample is relatively low, i.e. on average, only 1 TP53 mutation was observed for each patient (298 mutations across 285 HG-SOC patients). Altered or loss of function of this tumor suppressor appears to be critical for HG-SOC carcinogenesis.

[0189] The other cancer susceptibility gene BRCA2 was less frequently mutated and only 25 mutations were observed in 23 HG-SOC mutations. CHEK2 and BRCA1 mutations appear to be mutually exclusive in HG-SOC patients, as only 18% (4 of 22) patients with non-silent CHEK2 mutations harbour BRCA1 mutations (FIG. 3). Similarly, only 18% (4 of 22) patients with non-silent CHEK2 mutations harbour BRCA2 mutations (FIG. 3).

### A Mutation Cluster is Defined by Genes Involved in Various Cell-Cycle Related Processes

[0190] For a subset of 455 genes with observed mutations in at least 5 HG-SOC patients, unsupervised hierarchical clustering on the gene-patient mutation association matrix was performed. The full heatmap for 455 genes and 334 HG-SOC patients is shown in (FIG. 4). As expected, the TP53 mutations were observed in a majority of HG-SOC patients (85%, 285 out of 334). However, the intensity of TP53 mutations in a patient was low: generally only one TP53 mutation was observed in each p53 gene for a given patient. Interestingly, mutation sites along the TP53 locus appears to be randomly located across the exons and there appears to be no strong positive clonal selection for any particular gene variant (FIG. 5). The frequencies of mutations of other genes such as BRCA1 (12.0%, 40 out of 334) and CHEK2 (7.2%, 24 out of 334) across tumor samples were relatively smaller. However, the intensity of these mutations per gene is more than 3 times higher than for TP53 (on average, 3.38 and 3.96 mutations per patient for BRCA1 and CHEK2 respectively). The heatmap provides visual presentation of these finding. It also confirmed our previous finding that mutations in BRCA1 and in CHEK2 were generally mutually exclusive (FIGS. 3 and 4)

[0191] Results from hierarchical clustering also revealed a distinct gene-patient cluster associated 180 with CHEK2 (FIG. 4). This sub-cluster includes 58 gene symbols and 22 HG-SOC patients (FIG. 6). Within this cluster, mutations of CHEK2 appear to dominate, as multiple regions of CHEK2 were observed to be mutated in each of these patients (FIG. 6A). The annotation of the 58 gene symbols are listed in FIG. 7. Analysis of the 58 gene symbols via DAVID Bioinformatics revealed that these genes are significantly enriched in protein kinase activity (TBK1, PIK3C2B, MET, PRKCI, CHEK2, ALK, MAP3K6, PTK2B, RPS6KA2, MAPK15, PDGFRA, ROR2, TNK2 and INSR), adenyl and purine ribonucleotide binding (KIF4B, KIF3B, GCLC, TBK1, PIK3C2B, MET, PRKCI, TP53, CHEK2, ALK, ABCA3, MAP3K6, PTK2B, RPS6KA2, MAPK15, PDGFRA, ROR2, TNK2, CHD6, INSR, EP400 and MYO5C) and disease mutations (MAD1L1, HNF1A, GCLC, MET, TP53, ITGB2, CHEK2, GLI2, GLI3, ABCA3, ROR2, INSR, SPTB and FN1) (FIG. 8A). Further analysis via Metacore revealed significant association with immune response and DNA damage pathways as well as apoptotic and cell cycle gene networks (FIG. 8B,C). Network analysis of these 58 genes further identified a tight direct interacting network of 21 genes mostly involved in apoptosis, cell cycle control, DNA damage response and immune response (FIG. 6B). These biological categories and networks are strongly assigned to well-studied DNA damage, repair, cell cycle, check point regulation (FIG. 9).

[0192] The present technology describes a method of risk assessment, prognosis and therapy outcome prediction of high-grade serous ovarian carcinoma (HG-SOC) based on detection of germline and/or somatic mutations of DNA and/or mRNA and/or protein of the CHEK2-associated 58-mutated gene signature which comprises of:

[0193] ABCA3, ADAM15, ADAMTSL3, ALK, ANKHD1-EIF4EBP3, ANKMY2, ANXA7, ASPM, CDC27, CHD6, CHEK2, CHL1, DPYSL4, ENAH, EP400, ERBB2IP, FN1, FOXO3, GCLC, GLI2, GLI3, GYPB, GZMB, HLA-G, HNF1A, INPP5D, INSR, ITGB2, KIF3B, KIF4B, KTN1, LRRN2, MAD1L1, MAP3K6, MAPK15, MET, MKL1, MLL4, MYO5C, NUMA1, PDGFRA, PHLPP, PIK3C2B, PKP4, PLAGL2, PPARA, PRKCI, PTK2B, RAB3D, ROR2, RPS6KA2, RSU1, SPTB, TBK1, TNK2, TP53, VAV1 and ZC3H11A

[0194] and 21-mutated gene signature which comprises of:

[0195] ADAMTSL3, ATR, CHEK2, ENAH, ERN2, GLI2, GYPB, KIAA1324L, LRRN2, MAP3K6, MAPK15, MET, MLL4, NIPBL, PCDH15, PPP1CC, PTCH1, PTK2B, RPS6KA2, RSU1 and TNC.

[0196] This present invention includes the methods, the resulting signature, and consequent clinical applications to prognosis of diagnosed HG-SOC patients or screening of healthy women for risk prediction of developing the disease.

[0197] The methods leading to the development of the CHEK2, 58-gene and 21-gene mutational signatures include:
[0198] the use of unsupervised hierarchical clustering and supervised statistical analysis to identify a highly mutated cluster of 58 genes and HG-SOC patients who are characterized by mutations of CHEK2.
[0199] unbiased screening of highly mutated genes in HG-SOC patients (at least 5 patients) to identify 21 prognostic genes (ADAMTSL3, ATR, CHEK2, ENAH, ERN2, GLI2, GYPB, KIAA1324L, LRRN2, MAP3K6, MAPK15, MET, MLL4, NIPBL, PCDH15, PPP1CC, PTCH1, PTK2B, RPS6KA2, RSU1 and TNC) whose mutation status significantly and independently classify patients into low and high-risk subgroups.
[0200] the use of gene ontology, pathway and network analysis to assess and confirm the biological validity of 58 genes in the CHEK2-associated mutation cluster and 21 prognostic genes.
[0201] the use of Kaplan-Meier and log-rank test to confirm the prognostic significance of gene mutations in diagnosed HG-SOC patients.

[0202] The composition of a combined 21-gene mutational signature where:
[0203] HG-SOC patients are classified as low-risk if mutations are observed in ERN2 or no mutations are observed in ADAMTSL3, ATR, CHEK2, ENAH, GLI2, GYPB, KIAA1324L, LRRN2, MAP3K6, MAPK15, MET, MLL4, NIPBL, PCDH15, PPP1CC, PTCH1, PTK2B, RPS6KA2, RSU1 and TNC.
[0204] HG-SOC patients are classified as high-risk if mutations are not observed in ERN2 and mutations are observed in ADAMTSL3, ATR, CHEK2, ENAH, GLI2, GYPB, KIAA1324L, LRRN2, MAP3K6, MAPK15, MET, MLL4, NIPBL, PCDH15, PPP1CC, PTCH1, PTK2B, RPS6KA2, RSU1 and TNC.

[0205] The present technology proposes:
[0206] a method of using CHEK2 mutational status for overall survival prognosis and therapy response prediction for patients already diagnosed with HG-SOC.
[0207] a method of using the combined 58-gene mutational signature to identify high-risk subgroups associated mostly with germ-line or somatic mutations
[0208] a method of using the combined 21-gene mutational signature to classify patients into low or high-risk subgroup, where the 5-yr overall survival rates for the low and high-risk subgroups are 37% and 6%, respectively.
[0209] a method of using the combined 21-gene mutational signature to classify the high-risk patient subgroup into two further tumor subtypes based on characterization of germline and/or LOH and/or somatic mutations of genes of the 21-gene mutational signature. The first tumor subtype is associated with germline and/or LOH mutations of CHEK2 and/or RPS6KA2 and/or MLL4 genes whereas the other tumor subtype is associated with somatic mutations of other genes.
[0210] a method of using germline mutations of CHEK2 and/or RPS6KA2 and/or MLL4 genes to identify healthy women who might be susceptible to initiation, development and progression of tumors leading to HG-SOC.
   CHEK2 Mutations are Associated with Poor Prognosis of Diagnosed HG-SOC Patients

[0211] The initial analyses of the mutational spectrum of patients diagnosed with HG-SOC revealed a distinct gene-patient cluster where CHEK2 mutations appear to be highly concentrated in a few patients. Focusing subsequent analysis on CHEK2, mutations in this gene were examined to determine if they were associated with patient overall survival times, and if it could be used as a prognostic survival factor for patients already diagnosed with HG-SOC.

[0212] Stratification of the TCGA HG-SOC patients was performed based on the non-silent mutational status of the CHEK2 gene. In this analysis, a total of 311 patients with both mutational data and clinical information were studied (FIG. 10). Non-silent CHEK2 mutations were observed in 22 TCGA HG-SOC patients whereas mutations of CHEK2 in the remaining 289 patients (with clinical information) were not observed. Kaplan-Meier survival curve of the patient subgroup with CHEK2 mutations exhibited significantly poorer overall survival times when compared with the subgroup with no CHEK2 mutations (p-value≦0.01, FIG. 11A). Effectively, the results from retrospective study of TCGA data suggest that for patients already diagnosed with HG-SOC, non-silent mutations (germline, LOH or somatic) of the CHEK2 gene were greatly detrimental for patient overall survival times as these patients did not survive beyond 5 years after initial pathologic diagnosis.

[0213] In TCGA HG-SOC data, genes such as TP53, BRCA1 or MUC16 were mutated with higher frequency than CHEK2 but unlike CHEK2, the mutational status of these genes could not independently stratify HG-SOC patients into survival significant subgroups (FIG. 11B-D). Despite the lack of statistical significance, there is some slight indication that mutation in MUC16, a known clinical biomarker of ovarian cancer, could be associated with poor patient survival. On the other hand, patient with BRCA1 mutation appears to be associated with better patient survival which is consistent with several other published data. While TP53 is frequently mutated in HG-SOC and could be useful in disease diagnosis, our analysis revealed that in diagnosed patients, it could not be effective as a prognostic marker of patients' overall survival times (FIG. 11B).

CHEK2 Mutations are Associated with Poor Response to Therapy

[0214] The association between CHEK2 mutations with therapy resistance were investigated and were found to be significant in HG-SOC. From the TCGA data, HG-SOC patients were categorized into two subgroups. The first subgroup consists of patients who exhibited progressive disease after primary therapy. The second subgroup consists of patients with partial response, stable disease or complete response after primary therapy. Subsequently, a two-by-two contingency table was generated where the columns represent the two subgroups of patients previously defined, and the rows correspond to the mutational status of CHEK2. Analysis via kappa correlation measure revealed that mutations in CHEK2 gene were associated with progressive disease with borderline significance (kappa=0.1278, p-value=0.05536, FIG. 12A). When silent mutations were excluded from the analysis, a slightly more significant correlation with therapy resistance was observed (kappa=0.1422, p-value=0.03769, FIG. 12B). Essentially, 25% of patients with CHEK2 mutations (5 of 20) showed disease progression whereas only 8.8% of patients without CHEK2 mutations (21 of 237) showed disease progression. Therefore, the results indicate that CHEK2 mutations are associated with poor response to therapy.

Copy Number and mRNA Expression of CHEK2 do not Appear to have Significant Influence on HG-SOC Patient Survival

[0215] To understand if other aspects of CHEK2 could be associated with patient survival, patient information for CHEK2 across available datasets from copy number, mutation, expression and clinical experiments (FIG. 10) were consolidated and subsequently assessed their prognostic significance.

[0216] Copy number variation data was available for 356 patients. Analysis of copy number variation data for these patients revealed that CHEK2 was significantly amplified in 15 patients and deleted in 130 patients. The rest of the patients did not exhibit significant copy number variation. Subsequently, the analysis also showed that copy number of CHEK2 could not provide significant prognostic classification of HG-SOC patients (FIG. 13A). Also expectedly, samples with significant amplification of the CHEK2 region exhibited higher mRNA expression whereas those with significant deletion have lower expression (FIG. 13B).

[0217] Expression data was available for 399 samples, which comprised of 8 normal fallopian tube and 391 HG-SOC samples. Additionally, 370 of the 391 HG-SOC samples were described with tumor information such as tumor grade or tumor stage. Therefore, the expression profile of CHEK2 mRNA across the normal fallopian tube tissues and tumor tissues belonging to different grades or stages were investigated (FIG. 13C). The higher mRNA expression of CHEK2 in the tumors relative to the fallopian tube samples indicate the possible upregulation at early disease onset probably due to compensatory actions, and suggest the possibility of using CHEK2 mRNA expression as an early diagnostic biomarker for HG-SOC. On the other hand, the prognostic ability of CHEK2 expression data to classify patients already diagnosed with HG-SOC into low and high-risk subgroups is limited (FIG. 13D). A published computational algorithm was applied, which assign patients to low or high risk depending on an expression cut-off that was optimized by maximizing the separation of the two Kaplan-Meier survival curves, to CHEK2 mRNA expression belonging to the 391 HG-SOC patients. While 370 of 391 samples were annotated with clinical information, 12 were incomplete as they were without survival times and events. Therefore, survival analysis was performed on the 358 HG-SOC samples well annotated with clinical data. The results suggest that mRNA expressions of CHEK2 were not significantly associated with HG-SOC patients' prognosis (p-value=0.2057, FIG. 13D). Therefore, the results suggest that other aspects of CHEK2 such as expression or copy number variation 258 could not be used as prognostic features for HG-SOC patients.

### Observed Mutations of CHEK2 are Unlikely to Alter Phosphorylation Events or Protein Structure

[0218] CHEK2 is a serine/threonine-protein kinase which functions in the nucleus to regulate cell cycle, DNA repair and apoptosis in response to DNA double-strand breaks. As post-translational activation of Chk2 protein via phosphorylation events is required for its physiological function, the CHEK2 mutations were checked to determine if any were localized at known or predicted phosphorylation sites. Known phosphorylation sites of CHEK2 were collected from the databases of UniProt30 and Phospho.ELM. Of all the mutations reported for CHEK2, only one mutation site was found to co-localize with a known phosphorylation site (FIG. 14). Mutation data from TCGA HG-SOC patients revealed that CHEK2 was mutated at a nucleotide coding for residue Thr-383 (hg18, chr22:27421808-27421808 at exon 11). It has been reported that auto-phosphorylation of Chk2 at Thr-383/Thr-387 within the activation loop of Chk2 kinase domain and at Ser-516 at the C-terminal region of Chk2 are essential for Chk2 activation. However, mutations at the nucleotide coding for Thr-383 were observed in only 6 patients. Furthermore, as the mutations are synonymous, the same amino acid residue threonine would be coded and therefore, it does not currently appear that mutations here would lead to aberration of Chk2 function. The results also showed that CHEK2 mutations are not co-localized with any other phosphorylation sites computationally predicted by NetPhos and PHOSIDA33, 34 274 (FIG. 14), which suggest that based on our current results, alteration of phosphorylation events may not be the key mechanisms leading to altered Chk2 behavior.

[0219] It was determined if the observed DNA mutations along CHEK2 could potentially modify the protein structure. Using data generated from RNA-sequencing experiments and downloaded from the Sage Bionetworks' Synapse database, the expression data across various CHEK2 isoforms and primary solid tumors belonging to 262 patients were first examined. An isoform uc003adu.1 was identified (representing isoform 1 or A) to be dominantly expressed when compared to other CHEK2 isoforms (FIG. 15). Known secondary structures along the amino acid residues (isoform 1, UniProt ID: 096017) were collected and compared it with the observed DNA mutations (FIG. 14). The DNA mutations at the 8 distinct sites of CHEK2 DNA could potentially alter the protein structure at 7 distinct amino acid residues (FIG. 16A-B). Only one of the amino acid residues (Thr-383) occurred at a structured site of the protein. However, the secondary helix structure is unlikely to be disrupted as the DNA mutation at this region was silent. For further visualization, a representative protein crystal structure of physiological Chk2 and superimposed the 7 mutated residues was generated to study the sites of mutations, relative to its surrounding three-dimensional conformation (FIG. 16C). From the initial crystallographic structure of Chk2 from Thr89 to Glu501 (PDB code 3i6u36, resolved at 3.0 A), Modeller was used to complete the few missing loops and to extend the C-terminal region of the kinase until Leu543. Molecular dynamics (MD) simulations were performed to obtain the relaxed state conformation of the protein structure at 50 ns (FIG. 16C). From the figure, it could be observed that the mutated residues (represented by coloured spheres) were mostly located at non-structured regions of the protein. Therefore, our results from protein modeling and MD simulations suggest that DNA mutations of CHEK2 were unlikely to disrupt the protein structure and affect its physiological function.

Observed Mutations of CHEK2 could Affect Nuclear Import of the Protein

[0220] Modifications of the NLS signals were investigate were possible among these TCGA HG-SOC patients. It has been previously reported that NLS3 is the key NLS involved in the nuclear localization of Chk2 in cells (Zannini et al. J Biol Chem. 2003 278 (43): 42346-51). The monopartite NLS3, which was computationally predicted via PSORT II, occupies a stretch of short amino acids, spanning from residues 515-522 (amino-acid sequence: PSTSRKRP, FIG. 16B) of the protein. Mutation studies performed by Zannini et al. showed that mutation of this region resulted in the cytoplasmic localization of Chk2 protein which suggested the inability of altered Chk2 in translocating to the nucleus. Interestingly, the results reveals that along this short NLS sequence, there were 3 distinct nucleotide (corresponding to 2 amino acid residues—R519 and P522) sites of mutation belonging to TCGA HG-SOC patients (FIGS. 14 and 16). The mutation observed at chromosomal coordinate chr22:27413951 was a silent mutation observed in 21 patients (P522P, labelled grey in FIG. 16A). The two non-silent mutations at contiguous nucleotide positions chr22:27413961 and chr22:27413962 were present in 14 and 21 patients respectively (R519Q/R519G, labelled dark grey in FIG. 16A). In total, 21 patients were observed to exhibit mutations at either these 2 sites and together with findings that CHEK2 mutation are detrimental to patient's survival, the results suggest a possibility that mutations in the NLS region could adversely affect the nuclear import of Chk2, reduce the protein level of effective and functional Chk2, impact Chk2-associated repair pathways, and eventually contributing to poor patient survival.

[0221] As there were two other mutation sites downstream of the NLS3, an alternative computational tool, cNLS40 was used to predict NLSs along the Chk2 protein sequence (isoform A, NP_009125—543 amino acid residues). Results revealed the possibility of a functional bipartite NLS from amino acid residues 517-538 (TSRKRPREGEAEGAETTKRPAV, FIG. 16B). This region encompasses two basic residue cluster connected by a 12 amino acid residue linker. Interestingly, of the 21 TCGA HG-SOC patients observed with mutations at the nucleotide coding for R519, concurrent mutations of nucleotide coding for R535 were observed for 90% (19 of 21) of the patients (FIG. 16B). Results from this analysis suggest that the effective NLS region could be longer than the NLS3 identified by Zannini et al. Moreover, the co-occurrences of mutations coding for residues at both key components (basic residues) of a bipartite NLS further implied the possibility of positive clonal selection in the tumor tissue samples of these 19 HG-SOC patients.

### Identification of a 21-Gene Prognostic Signature

[0222] The prognostic significance of the mutational status of 282 genes was studied with observed mutations in at least 5 patients with clinical information. The results revealed that there are 21 genes that were non-silently mutated in at least 5 patients and can independently stratify HG-SOC patients into prognostically significant subgroups (p-value≦0.05, FIG. 17). The top 3 mutated genes with prognostic significance among these 21 genes include CHEK2, RPS6KA2 and MLL4 with non-silent mutations in 22, 23 and 20 patients respectively (FIG. 17). Interestingly, the results from hierarchical clustering also revealed that these genes are clustered together (FIG. 6A). Quantitatively, kappa correlation analysis further revealed the high co-occurrences of CHEK2 mutations with RPS6KA2 or MLL4 mutations (kappa≧0.75, p-value≦5E-20, FIG. 3).

[0223] Overall, a considerable overlap of these prognostic significant genes with the genes of the CHEK2-associated mutation sub-cluster was observed (p-value=6e-08, FIG. 18A). As patients with CHEK2 mutations will generally also have mutations of genes in the mutation cluster (FIG. 6A), only the 21 prognostic genes were reviewed to create a combined mutational prognostic signature. Among these 21 genes, the mutation status of 20 genes exhibited pro-oncogenic behaviour where mutations were associated with poorer overall survival (FIG. 17). In contrast, only ERN2 exhibited tumor suppressive behaviour where mutations were associated with better overall survival. Using these genes, patients were classified into the lower risk subgroup if there were mutations in ERN2 or there were no mutations in all the 20 pro-oncogenic genes. On the other hand, patients with mutations in any of the 20 pro-oncogenic genes and without ERN2 mutations were classified as higher risk. Results from the Kaplan-Meier survival plots revealed that the 21-gene signature-defined patient subgroups were significantly stratified and associated with overall survival times (p-value=7.31e-08, FIG. 18B). Specifically, the 5-year overall survival rates of the low and high-risk subgroups are 37% and 6% respectively. To investigate if the prognostic significance of the 21-gene signature (FIG. 18B) being due to the contribution of CHEK2 mutations alone, patients with CHEK2 mutations were excluded from the signature-defined high-risk subgroup. Our results indicated that patients diagnosed with either CHEK2 mutations, or mutations in any of the remaining 20-genes signature (excluding CHEK2) exhibited rather similar overall survival patterns (FIG. 19C). The poor prognosis of patients exhibiting mutations in any of the genes in the 20-genes signature suggest that the aberrant functioning of these genes in the HG-SOC genome could inversely impact patients' post-surgery response to therapy, independent and regardless of the effects of CHEK2 mutations.

[0224] The clinical characteristics of these two subgroups of patients revealed that high-risk patients defined by the 21-gene signature are correlated with progressive disease. Specifically, patients defined as high-risk by the 21-gene mutational signature was twice as likely to exhibit progressive disease in contrast to the low-risk subgroup (high risk: 8 of 50 patients=15%; low-risk: 18 of 208 patients=8.7%, FIG. 19). However, the statistical significance is borderline (kappa=0.08984, p-value=0.06065). Nevertheless, the trend suggests that these genes could be important factors in therapy resistance.

[0225] The detailed annotations of the genes in the 21-gene prognostic signature are listed in (FIG. 20). Subsequently, gene ontology analysis of the 21 genes of the signature using DAVID Bioinformatics was performed. Results indicate that these genes are strongly enriched in functions associated with kinase activity, ATP-binding and phosphorylation (FIG. 21). In parallel, analysis via MetaCore also revealed association of pathways associated with DNA damage induced responses, as well as gene networks associated with cell cycle, DNA repair, and apoptosis (FIG. 21B-C).

Identification of Two Tumor Subclasses from the Signature-Defined High-Risk Subgroup

[0226] To study the possible heterogeneity of the poor prognosis patient subgroups identified via CHEK2 or the 20-gene signature, a gene-patient mutation matrix for the 21 genes and 58 patients defined as high-risk was generated (FIG. 22A). These mutations were further characterized in terms of germline, LOH or somatic mutations and our results showed that the mutations of genes in a subset of 22 patients with CHEK2 mutations appeared to be of germline or LOH origin whereas that of the other 36 high-risk patients appeared to be somatic (FIGS. 22B-D). Specifically, in the subset of 22 patients with CHEK2 mutations, 16 of the patients (73%) exhibited non-silent germline CHEK2 mutations (FIG. 23). Interestingly among these 16 patients, strong co-occurrences of germline mutations in RPS6KA2 and MLL4 genes were observed in 15 (94%) and 12 (75%) patients respectively. Re-analysis of the entire gene-patient mutation matrix (of 455 highly mutated genes and 334 patients) also revealed similar findings that genes from the CHEK2-associated mutation 410 sub-cluster were associated with germline or LOH rather than somatic mutations (results not shown).

[0227] Our results revealed that among the high-risk patients identified via our 21-gene signature, there could be two distinct tumor subclasses whose initial pathogenesis could be driven by either inherited germline mutations of CHEK2, RPS6KA2 and MLL4, or spontaneous somatic mutations of the other signature genes.

Mutations of CHEK2 in HG-SOC could Affect Nuclear Localization and Lead to Poor Clinical Outcomes

[0228] Many published mutational studies focus only on specific classes of mutations such as somatic or germline variants. The focus on germline or somatic mutations would be appropriate for specific studies when one is interested in inherited risk of developing a particular disease upon birth, or identification of driver mutations for disease development at later stages of life respectively. For prognosis purpose, whether the mutation is due to early inheritance or later stage environmental factors is of less relevance. As such, all classes of mutations were included during prognosis stratification.

[0229] Interestingly, HG-SOC patients that carry Chk2 mutations are at higher risk of mortality. But importantly, it could also prompt further studies into alternative targeted therapy for these patients. A possible explanation of why Chk2 mutations are associated with adverse patient prognosis could be due to induction of chemo-resistance, as significant correlation was found between CHEK2 and therapy response (kappa=0.1422, p-value=0.03769, FIG. 12B). None of the observed mutations in TCGA HG-SOC patients occurred in annotated secondary structures, ATP-binding site, active site, FHA domain or kinase domain (FIG. 14). Therefore, there appears to be insufficient evidence that CHEK2 mutations observed in TCGA HG-SOC patients could disrupt the protein structure, dimerization process or kinase activity and contribute to chemo-resistance.

[0230] In ovarian cancer, cisplatin is used as the main chemotherapeutic agent. Zhang et al. reported that cisplatin treatment could degrade Chk2 protein and the reduced level of Chk2 could hinder cell-cycle control, prevent cell apoptosis, and contribute to chemo-resistance of the tumors. Chk2 degradation may be one of the primary mechanism by which a large number of clinically relevant tumors develop the acquired resistance to DNA damage agent. With regards to the patients who exhibited CHEK2 mutations, the loss of function of one copy via either somatic or germline mutation, could result in reduced copies of CHEK2 in the nucleus, and subsequently upon cisplatin treatment, the effects of CHEK2 degradation could be accentuated and ultimately detrimental for patient survival. Interestingly, the reason why the observed mutations of CHEK2 might initially contribute to loss of protein functions could be attributed to the lack of protein localization in the nucleus. The lack of nuclear localization of Chk2 is likely to contribute to deviation from physiological activity and leads to undesirable effects. The analysis revealed that in 21 HG-SOC patients of the TCGA cohort, CHEK2 mutations occurred within a nuclear localization signal critical for nuclear import of the protein (FIG. 16B). Mutations of the nuclear localization signal inhibit nuclear import of the Chk2 protein, leading to reduced functional copies of Chk2 in the nucleus. It appears plausible, that mutations along the nuclear localization signal of the CHEK2 gene could lead to reduced levels of Chk2 proteins in the nucleus and upon cisplatin treatment, the protein levels would be further depleted, which could potentially lead to enhanced proliferation of the tumors in the presence of cisplatin mimicking chemo-resistance and resulting in adverse patient survival. The results showed that HG-SOC patients who exhibited CHEK2 mutations were significantly associated with poor clinical outcomes and did not survive beyond five years after initial diagnosis (FIGS. 11A and 12).

### Observed CHEK2 Mutations are Unlikely to Affect Post-Translational Modifications

[0231] CHEK2's association with poor patient prognosis was examined to see if the mutation could be due to modification of the phosphorylation sites. However, none of the observed mutations in CHEK2 occur along any currently known and annotated phosphorylation sites. Therefore, computationally identified phosphorylation motifs from the literature were collected and investigated if any of the key residues along the motifs are mutated in TCGA HG-SOC patients. The results revealed that despite their close proximity, none of the observed mutations occurred at the phosphorylation sites or the key motifs surrounding the phosphorylation sites. Furthermore, the analysis revealed that the region surrounding the CHEK2 mutations does not seem to contain strong protein secondary structure, and therefore it may currently seem unlikely that aberrations of post-translational modification of the Chk2 protein are contributory factors leading to poor survival prognosis of affected patients. However, the effect of CHEK2 mutations on protein dimerization or physical interaction with other protein partners could be investigated further.

### Possible Influences of Silent Mutations

[0232] While it is hypothesized that the mutations observed along the CHEK2 could affect nuclear translocation of the translated protein, other mechanism involving silent mutations could also be involved.

[0233] It was observed that 21 HG-SOC patients exhibited silent mutations at chr22:27413951 (P522P, FIG. 16). Traditionally, silent DNA mutations which encode for the same amino acid residues were assumed to have negligible effect on a protein function. However, recent studies have suggested that silent mutations could affect downstream protein functionality via various mechanisms. For instance, alterations to the DNA triplet codon could alter the binding sites of miRNA, leading to alteration in translational repression efficiency and downstream signal networks. It was investigated whether the mutation at chr22:27413951 (P522P, FIG. 16) could potentially alter miRNA binding sites, the results from sequence alignment indicate that the specific region was not targeted by any of the currently known human mature miRNAs (results not shown). Therefore alteration of miRNA target sites via synonymous mutation is unlikely to have any effect on mRNA stability and its subsequent translation in the mutations examined.

[0234] Single synonymous DNA mutation can affect mRNA secondary structure, folding, stability and consequently, the regulation of the translated protein as was reported for the human dopamine receptor D2 gene. It was also suggested that synonymous mutations could affect translational efficiency of the amino acid residue due to the variation and asymmetry of tRNA abundance in cells. Even in cases where synonymous mutations do not affect mRNA or protein levels, the function of the translated protein could be altered. In MDR1 gene, it was shown that a synonymous polymorphism resulting in a rare triplet codon can alter substrate specificity of the MDR1 protein, possibly due to deceleration of the translation rate at that amino acid residue which in turn affects protein folding. The strong overlap in 14 common patients exhibiting both the silent mutation and non-silent mutation at the last exon (FIG. 16A) appears to suggest a possible positive selection of these mutations and future studies could focus on elucidating the possible influence of silent mutations on eventual protein expression and functionality.

### Potential Clinical Application of the 21-Gene Mutational Signature for Prognosis and Therapeutics Design

[0235] While CHEK2 mutation appears to be the most important with respect to patient classification based on their survival patterns, a total of 21 genes were identified which could independently and significantly stratify patients into low and high-risk subgroups based on their mutational status (FIG. 17). Applying the 21 combined gene classifier to the TCGA patient cohort resulted in significant stratification of patients into two survival significant subgroups where the 5-yr overall survival rates for the low and high-risk subgroups are 37% and 6% respectively (p-value=3.8E-09, FIG. 18B). Furthermore, stratification based on the mutational status of CHEK2 alone, or of the remaining 20-gene signature permitted rejection of the hypothesis that the prognostic value of the 21-gene signature was due to the contribution of CHEK2 alone (FIG. 18C). Rather, this shows that a poor prognosis subgroup could be identified based on a 20-gene signature even in the absence of CHEK2 mutations. For prognosis purpose, while the use of the 21 gene mutational signature in patient risk prediction from the retrospective study of the TCGA patient cohort is useful, prospective studies would validate the use of the signature in a clinical setting.

[0236] Interestingly, amongst the 21 genes whose mutational status were most suitable for prognostic applications, gene functions associated with protein kinase activity, ATP-binding, phosphorylation, DNA damage response, apoptosis, or cell cycle regulation were enriched (FIG. 21). Mutations in kinases such as CHEK2 or RPS6KA2 were found to be associated with patient survival and patient stratification. Patients with characterized mutations of CHEK2 or RPS6KA2 only represent a subset of the HG-SOC patients. Most HG-SOC patients were characterized by mutations in only a few genes (FIGS. 4 and 22), which is consistent with the general consensus that patient-gene mutational profiles are heterogeneous and sparse. Nevertheless, it has been postulated that individual patients could exhibit mutations in different genes that are functionally related via gene networks corresponding to cancer hallmarks. Therefore, any particular biological process could be impacted via aberrations of any of its member genes. The understanding of the heterogeneous nature of mutations in HG-SOC patients could present an opportunity for more effective and targeted treatments in future.

### Potential Clinical Application of the 21-Gene Mutational Signature for Risk Prediction of Developing HG-SOC

[0237] Analysis of 58 high-risk HG-SOC patients identified via the 21-gene signature also revealed two distinct tumor subtypes which could arise from two different tumor etiological factors. The first tumor subclass (or patient subgroup) was clearly characterized by germline mutations or LOH of genes such as CHEK2, RPS6KA2 and MLL4 (FIG. 22). In contrast, for the other tumor subclass (or patient subgroup), germline mutations of these genes were not observed. Rather, this tumor subclass appears to be the result of spontaneous somatic mutations of these genes in the presence of TP53 mutations that typically characterized HG-SOC tumors.

[0238] In fact, ovarian cancer is highly heterogeneous with various driver genes involved in the development of several cancer subtypes (FIG. 24A). The results suggest that around 11.6% of HG-SOC tumors could possibly be initiated due to spontaneous somatic mutations of the genes in the signature in the presence of TP53 mutations. Also, within high-grade serous ovarian cancer that is characterized by TP53 point mutations and genome instability, inherited germline CHEK2 mutations may confer susceptibility, and be involved in the initiation, development and progression of tumors in about 7.1% of HG-SOC patients (FIG. 24). The results also suggest the possibility that germline mutations of CHEK2, RPS6KA2 or MLL4 could be used as risk factors to predict a person's risk of developing HG-SOC. For CHEK2, studies have been conducted to study the effect of gene variants on ovarian susceptibility but associations were reported to be insignificant, possibly due to the rare occurrence of CHEK2 mutations, small tumor sample size, lack of appropriate HG-SOC patient samples, or low resolution of variant detection of available samples. Nevertheless, the current results from a high quality HG-SOC dataset from TCGA has uncovered a previously uncharacterized association of disease susceptibility due to CHEK2 germline variants.

### Potential Clinical Application of CHEK2 Expression in Early Diagnosis of HG-SOC

[0239] The results revealed that CHEK2 mRNA was up-regulated in tumor samples relative to normal tissues of the fallopian tube (FIG. 24B), this suggests the possibility that elevated CHEK2 mRNA expression may be used as early diagnostic marker of high-grade serous ovarian cancer. The elevated expression of CHEK2 could possibly due to response to DNA-damage or genome instability associated with TP53 mutations in HG-SOC. The induction of apoptosis in tumor cells via inhibiting Chk2 could be beneficial in preventing uncontrollable cell proliferation which consequently could lead to better patient survival. However, a recent study found that Chk2-depletion in ovarian cancer cell lines diminished cisplatin sensitivity and raised further suspicions if Chk2 could be an effective therapeutic target in cisplatin treated HG-SOC patients.

### TCGA HG-SOC Data Source and Pre-Processing

[0240] Processed mutation data belonging to 334 TCGA HG-SOC patients were downloaded from the TCGA data portal on 24th November 2010. The sequences were generated by Human Genome Sequencing Centers (HGSCs) at Baylor College of Medicine (BCM), Broad Institute Genome Center (BI) and Genome Institute at Washington University (WUSM) based on either Illumina or ABI SOLID sequencing technologies. This release included 105 Level 2 and 91 Level 3 (BCM) patients, 172 Level 2 and 158 Level 3 patients from BI, and 88 as Level 2 and Level 3 WUSM patients.

[0241] In total, 21978 mutations spanning across 334 patients and 10489 RefSeq gene symbols were reported. 4339 mutations with unknown mutation status were removed. The remaining 17639 mutations were observed in 9083 genes and encompass variants such as insertion, deletion, SNPs and silent mutations. The clinical information corresponding to each HG-SOC patients was also downloaded.

[0242] In addition, mRNA expression data of 463 primary solid ovarian cancer tissue samples were obtained (from 11 batches of 21-47 samples each). Quality assessments were performed within each batch to identify poor quality chips. 74 poor quality chips were removed from subsequent analysis. Background correction and normalization were done within each batch. Finally, batch effects were eliminated across batches using the nonparametric ComBat software.

### Copy Number Variation Analysis

[0243] Tumor-blood paired samples downloaded from TCGA portal were used.

[0244] The blood copy number variations were used for normalization and estimation of the fold change enrichment/under representation of copy number variation data for matched tumor samples. TCGA SNP array data (CNV platform 6) were processed via PARTEK 6.5 program at the parameters recommended by the company. Using PARTEK software, genomic coordinates of the copy variation segments were identified which form the statistically significant deleted or amplified genome regions. For each tumor sample, these significant regions were mapped on the human genome coordinates and normalized fold change of such signals were visualized via USCS Genome browser custom tracks. Changed copy numbers in ovarian tumours exhibit a high level of chromosomal instability. 20573 genes overlapped with changed CN segments representing about 70% of RefSeq protein-coding genes overlapped with significant alteration copy number regions.

### Processed RNA-Sequencing Expression Data

[0245] Processed RNA-sequencing expression data of genes and the gene isoforms were downloaded from the Sage Bionetworks' Synapse database. This dataset contains RNA-seq expression data for 73598 gene isoforms and 266 samples corresponding to 263 patients. Of the 266 samples, 262 samples (from 262 patients) were collected from primary solid tumor whereas the rest were collected from recurrent solid tumor.

### Secondary Data Source

[0246] Protein annotation data comprising of important functional sites, secondary structure, natural variants, mutagenesis experimental data, and phosphorylation sites was obtained from UniProt. Additionally, known phosphorylation sites were downloaded from validated database Phopho.ELM. Phosphorylation sites were further predicted using online tools NetPhos and PHOSIDA which were based on machine learning techniques such as artificial neural network or support vector machine. Nuclear localization signals were predicted via online computational tools PSORT II and cNLS Mapper.

### Mutation Matrix Across Patients and Genes

[0247] The mutation spectrum across the patients and genes are represented in a two-dimensional matrix, M comprising of 9083 rows and 334 columns which represent gene symbols and patient sample IDs respectively. Each entry in the matrix, Mᵢⱼ represents the number of unique mutation sites in the i^{th} gene of the j^{th} patient sample.

### Analysis of the Frequency Distribution of the Number of Mutated Tumor Samples for a Susceptible Gene

[0248] The Kolmogorov-Waring (K-W) probability function is used to fit the distribution of the number of mutated tumor tissue samples. The function is described as:

$$P ( X - m ) := {p}_{m} = {p}_{o} \frac{B ( b + 1 , m )}{B ( a , m )} {θ}^{m} \qquad ( Eq 1 )$$

[0249] where m=0, 1, 2, . . . and b, a, θ are the parameters of our model. B(x) is the Beta function as previously described. In the case where b>a>0, the probability of non-observed events is estimated by the formula

$$Po = ( 1 - \frac{a}{b} ) , \qquad Eq 1$$

can be presented in the form of the following recursive formula for easy computational estimate of the model parameters:

$${P}_{m + 1} = θ \frac{( a + m )}{b + m + 1} {P}_{m} , \qquad ( Eq 2 )$$

[0250] In order to apply the probability function (Eq1) or (Eq2) to the observed data, it was assumed that the random variable X is restricted to sample size and the rarest events are non-observed. Thus, random variable X is doubly truncated, i.e., the range 1, 2, . . . , J(J<∞). Using (Eq1), the probability distribution function of the resulting truncated distribution function is written as the following:

$${P}_{m}^{T} = {P}_{m} / ( {\sum }_{s = 1}^{s = J} {P}_{s} ) = \frac{Pm}{1 - Po - PJ + 1 / Po , J + 1} \qquad ( Eq 3 )$$

[0251] This probability distribution function corresponds to a typical situation in analysis of mutagenesis data in a limited cohort where the occurrence values 0 and J+1, J+2, . . . are not detected. Details of the curve-fitting computational algorithm have been previously published.

### Hierarchical Clustering

[0252] A numerical matrix that represents the mutation pattern across patients and genes are generated. Rows and columns correspond to genes and patients respectively. Each numerical value in the matrix represents the number of distinct locations with reported mutations, for that patient and gene. Hierarchical clustering analysis was performed using Kendall-tau as the similarity metric and complete linkage as the clustering method. The mathematical procedure was implemented in Gene Cluster 3.0 and visualized via Java TreeView. The intensity of the plot corresponds with the number of distinct mutated locations for that patient and gene.

### Gene Enrichment and Network Analysis

[0253] Gene functional enrichment analysis was performed via DAVID Bioinformatics and MetaCore from GeneGo Inc. The default human genome genes were used as the background set. Default parameters were used. The gene network was generated via MetaCore via direct interacting network algorithm. The legend of the network can be assessed from http://ftp.genego.com/files/MC_legend.pdf.

### Survival Analysis

[0254] Survival analyses of patient subgroups were performed with reference to their overall survival times (years to last follow up) and survival event (vital status at last follow up). Comparative survival times and events of patient subgroups were visualized using Kaplan-Meier survival curves which represents the probability of patient survival at a given time after initial diagnosis. The statistical significance of patient subgroup stratification across the full survival time range was evaluated using the log-rank test, which is based on the chi-sq distribution. The procedures were implemented using open source R programming language and packages.

### Measure of Agreement Test

[0255] The correlations between ordered patient subgroups with clinical parameters such as therapy response were calculated using weighted kappa correlation measure. The statistical significance was estimated using Mantel-Haenszel (MH) test. The calculations were implemented using StatXact-9 (computed weight: quadratic difference, scores: equally spaced). All p-values are one-sided (right-tailed) which indicates the probability that a random kappa correlation measure is greater than actually observed.

### Protein Structure Modeling

[0256] The initial structure was taken from the crystal structure of the serine/threonine protein kinase chk2. (PDB code 3i6u, resolved at 3.0 A). The crystallographic unit contains a dimeric protein (chains A and B). The crystal construct comprises from residue Thr89 to Glu501. The program Modeller has been used to complete few missing loops and to extend the C-terminal region of the kinase until Leu543, in order to include the nuclear localization signal motif. PDB2PQR was used for protonation of residues. MD simulations were set up using the antechamber and LEaP modules in the AMBER 12 package. The system was solvated in a truncated octahedron TIP3P water box and neutralised with sodium ions. Minimization and MD simulations using the amber ff99SB allatom forcefield, were carried out with the Sander module of the Amber12 package using the GPU-accelerated version of the program. A multistep scheme was followed, as previously described. The conformation at 50 ns was extracted and assumed that along the trajectory the kinase and especially the C-termini tail have adopted a relaxed state. PyMOL has been used to visualise and generate the figures.

1. A method for determining the prognosis of a patient afflicted by high-grade serous ovarian cancer (HG-SOC), comprising determining the presence or absence of a mutation in the CHEK-2 gene and optionally a gene selected from CHEK2, ERN2, ADAMTSL3, ATR, ENAH, GLI2, GYPB, KIAA1324L, LRRN2, MAP3K6, MAPK15, MET, MLL4, NIPBL, PCDH15, PPP1CC, PTCH1, PTK2B, RPS6KA2, RSU1 and TNC in a sample obtained from said patient, wherein the presence of a mutation in the ERN2 gene is indicative for a favorable prognosis of the patient and the presence of a mutation in any one of the CHEK2, ADAMTSL3, ATR, ENAH, GLI2, GYPB, KIAA1324L, LRRN2, MAP3K6, MAPK15, MET, MLL4, NIPBL, PCDH15, PPP1CC, PTCH1, PTK2B, RPS6KA2, RSU1 and TNC genes is indicative for an unfavorable prognosis of the patient and wherein determining the presence or absence of a mutation in the CHEK2 marker comprises detecting the presence or absence of a mutation in a nucleotide sequence as set forth in any one of SEQ ID NOS. 1 and 67-69.

2. The method of claim 1, further comprising the step of confirming the prognosis by microscopic analysis of an ovarian tissue biopsy or by ultrasound.

3. (canceled)

4. The method of claim 1, wherein the mutation in the CHEK2 marker is located in exon 10, 11 or 15 of the CHEK2 marker.

5. The method of claim 1, wherein the mutation in the CHEK2 marker is located in the terminal exon expressing a nuclear localization signal sequence.

6. The method of claim 4, wherein the mutation is located at a codon sequence expressing amino acid R346, T383, R406, R519, P522, R535 and/or P536.

7. The method of claim 1, further comprising determining a mutation in any one of the genes selected from the group consisting of ABCA3, ADAM15, ALK, ANKHD1-EIF4EBP3, ANKMY2, ANXA7, ASPM, CDC27, CHD6, CHL1, DPYSL4, EP400, ERBB2IP, FN1, FOXO3, GCLC, GLI3, GZMB, HLA-G, HNF1A, INPP5D, INSR, ITGB2, KIF3B, KIF4B, KTN1, MAD1L1, MKL1, MYO5C, NUMA1, PDGFRA, PHLPP, PIK3C2B, PKP4, PLAGL2, PPARA, PRKCI, RAB3D, ROR2, SPTB, TBK1, TNK2, TP53, VAV1 and ZC3H11A.

8. The method of claim 1, wherein determining a mutation in any one of the marker genes comprises detecting the presence or absence of a mutation in a nucleotide sequence selected from the group consisting of nucleic acid sequences set forth in SEQ ID NOS 3-5, 7-9, 11-14, 19, 20, 22-73, 77-79 and 99-175.

9. The method of claim 1, further comprising determining a mutation in any one of the marker genes comprises detecting the presence or absence of a mutation in a nucleotide sequence selected from the group consisting of the nucleic acid sequences set forth in SEQ ID NOS 2-21, and 70-102.

10. The method of claim 1, comprising determining the presence or absence of a mutation in a panel of gene markers comprising CHEK2, ERN2, ADAMTSL3, ATR, ENAH, GLI2, GYPB, KIAA1324L, LRRN2, MAP3K6, MAPK15, MET, MLL4, NIPBL, PCDH15, PPP1CC, PTCH1, PTK2B, RPS6KA2, RSU1 and TNC.

11. The method of claim 10, wherein the panel of markers comprises detecting the presence or absence of a mutation in a nucleotide sequences set forth in SEQ ID NOS 1-21, and 67-102.

12. The method of claim 1, wherein the ERN2 marker comprises a nucleic acid sequence set forth in SEQ ID NO. 2.

13. The method of claim 10, wherein the presence of a mutation in the panel of markers comprising CHEK2, ADAMTSL3, ATR, ENAH, GLI2, GYPB, KIAA1324L, LRRN2, MAP3K6, MAPK15, MET, MLL4, NIPBL, PCDH15, PPP1CC, PTCH1, PTK2B, RPS6KA2, RSU1 and TNC is indicative of an unfavorable therapeutic outcome of the patient.

14. The method of claim 1, wherein a first tumor subtype is determined by a germ line mutation in CHEK2, RPS6KA2 and/or MLL4 marker.

15. The method of claim 1, wherein a first tumor subtype is determined by a germ line mutation in marker sequences set forth in SEQ ID NOS 1, 3, 4 67-69, and/or 70.

16. The method of claim 1, comprising determining the presence or absence of a mutation in a panel of gene markers comprising CHEK2, ABCA3, ADAM15, ADAMTSL3, ALK, ANKHD1-EIF4EBP3, ANKMY2, ANXA7, ASPM, CDC27, CHD6, CHL1, DPYSL4, ENAH, EP400, ERBB2IP, FN1, FOXO3, GCLC, GLI2, GLI3, GYPB, GZMB, HLA-G, HNF1A, INPP5D, INSR, ITGB2, KIF3B, KIF4B, KTN1, LRRN2, MAD1L1, MAP3K6, MAPK15, MET, MKL1, MLL4, MYO5C, NUMA1, PDGFRA, PHLPP, PIK3C2B, PKP4, PLAGL2, PPARA, PRKCI, PTK2B, RAB3D, ROR2, RPS6KA2, RSU1, SPTB, TBK1, TNK2, TP53, VAV1 and ZC3H11A.

17. The method of claim 16, wherein the panel of gene markers comprises detecting the presence or absence of a mutation in a nucleotide sequences set forth in SEQ ID NOS 3-5, 7-9, 11-14, 19, 20, 22-66, 70-73, 77-79 and 99-175.

18-31. (canceled)

32. The method according to claim 1, wherein the presence or absence of said mutation can predict patients' resistance to therapy.

33. The method according to claim 1, comprising the characterization of two distinct HG-SOC genetic subclasses, wherein one of the tumor subclasses is defined via determining the presence or absence of a germline mutation in a panel of gene markers comprising CHEK2, MLL4 and/or RPS6KA2, and wherein the second subclass is defined via determining the presence or absence of a somatic mutation in a panel of gene markers comprising ADAMTSL3, ATR, ENAH, ERN2, GLI2, GYPB, KIAA1324L, LRRN2, MAP3K6, MAPK15, MET, NIPBL, PCDH15, PPP1CC, PTCH1, PTK2B, RSU1 and/or TNC.

34. The method according to claim 13, wherein the presence or absence of a germline mutation in a panel of gene markers comprising CHEK2, MLL4 and RPS6KA2 can predict healthy individuals' inherited susceptibility to initiation, development and progression of tumors leading to HG-SOC.

35. The method according to claim 1, comprising determining the presence or absence of a mutation in a marker gene via any sequencing methods.

36. A method for determining the risk of a healthy woman to develop HG-SOC, comprising determining the presence or absence of a mutation in the CHEK-2 gene in a sample obtained from said woman, wherein determining the presence or absence of a mutation in the CHEK-2 marker comprises detecting the presence or absence of a mutation in a nucleotide sequence as set forth in any one of SEQ ID NOS. 1 and 67-69.

37. The method according to claim 36, wherein the sample is a body fluid, cell or tissue sample.

The application's sequence listing, which the Patent Office published only in electronic form, follows.

SEQUENCE LISTING (175 sequences)

SEQ ID NO: 1 - DNA, 1991 bp, Homo sapiens
gcaggtttagcgccactctgctggctgaggctgcggagagtgtgcggctccaggtgggctcacgcggtcgtgatgtctcgggagtcggatgttgaggctcagcagtctcatggcagcagtgcctgttcacagccccatggcagcgttacccagtcccaaggctcctcctcacagtcccagggcatatccagctcctctaccagcacgatgccaaactccagccagtcctctcactccagctctgggacactgagctccttagagacagtgtccactcaggaactctattctattcctgaggaccaagaacctgaggaccaagaacctgaggagcctacccctgccccctgggctcgattatgggcccttcaggatggatttgccaatcttgagacagagtctggccatgttacccaatctgatcttgaactcctgctgtcatctgatcctcctgcctcagcctcccaaagtgctgggataagaggtgtgaggcaccatccccggccagtttgcagtctaaaatgtgtgaatgacaactactggtttgggagggacaaaagctgtgaatattgctttgatgaaccactgctgaaaagaacagataaataccgaacatacagcaagaaacactttcggattttcagggaagtgggtcctaaaaactcttacattgcatacatagaagatcacagtggcaatggaacctttgtaaatacagagcttgtagggaaaggaaaacgccgtcctttgaataacaattctgaaattgcactgtcactaagcagaaataaagtttttgtcttttttgatctgactgtagatgatcagtcagtttatcctaaggcattaagagatgaatacatcatgtcaaaaactcttggaagtggtgcctgtggagaggtaaagctggctttcgagaggaaaacatgtaagaaagtagccataaagatcatcagcaaaaggaagtttgctattggttcagcaagagaggcagacccagctctcaatgttgaaacagaaatagaaattttgaaaaagctaaatcatccttgcatcatcaagattaaaaacttttttgatgcagaagattattatattgttttggaattgatggaagggggagagctgtttgacaaagtggtggggaataaacgcctgaaagaagctacctgcaagctctatttttaccagatgctcttggctgtgcagtaccttcatgaaaacggtattatacaccgtgacttaaagccagagaatgttttactgtcatctcaagaagaggactgtcttataaagattactgattttgggcactccaagattttgggagagacctctctcatgagaaccttatgtggaacccccacctacttggcgcctgaagttcttgtttctgttgggactgctgggtataaccgtgctgtggactgctggagtttaggagttattctttttatctgccttagtgggtatccacctttctctgagcataggactcaagtgtcactgaaggatcagatcaccagtggaaaatacaacttcattcctgaagtctgggcagaagtctcagagaaagctctggaccttgtcaagaagttgttggtagtggatccaaaggcacgttttacgacagaagaagccttaagacacccgtggcttcaggatgaagacatgaagagaaagtttcaagatcttctgtctgaggaaaatgaatccacagctctaccccaggttctagcccagccttctactagtcgaaagcggccccgtgaaggggaagccgagggtgccgagaccacaaagcgcccagctgtgtgtgctgctgtgttgtgaactccgtggtttgaacacgaaagaaatgtaccttctttcactctgtcatctttcttttctttgagtctgtttttttatagtttgtattttaattatgggaataattgctttttcacagtcactgatgtacaattaaaaacctgatggaacctggaaaa

SEQ ID NO: 2 - DNA, 3634 bp, Homo sapiens
gcttgtacctgctgtgcagtgaggactccaggaactgatgatgaaccggcacggtcctcggcacgtggcaagttctccataagtgggctcagtaaaatccctctcccgggaaagcgccccaccgtgtttggtggggtgactgggacgcgaggatgcggctgggagtgtgatgagaagggcggggatcggcgaggactccaggctggggttgcaggcccagccaggggcggagccttctccgggtcgggcggggacagagcgctcccttggaggcacccagggacctggccagccgtgcagctgcccaggcgctatggcgagtgcggtcagggggtcgaggccgtggccccggctggggctccagctccagttcgcggcgctgctgctcgggacgctgagtccacaggttcatactctcaggccagagaacctcctgctggtgtccaccttggatggaagtctccacgcactaagcaagcagacaggggacctgaagtggactctgagggatgatcccgtcatcgaaggaccaatgtacgtcacagaaatggcctttctctctgacccagcagatggcagcctgtacatcttggggacccaaaaacaacagggattaatgaaactgccattcaccatccctgagctggttcatgcctctccctgccgcagctctgatggggtcttctacacaggccggaagcaggatgcctggtttgtggtggaccctgagtcaggggagacccagatgacactgaccacagagggtccctccaccccccgcctctacattggccgaacacagtatacggtcaccatgcatgacccaagagccccagccctgcgctggaacaccacctaccgccgctactcagcgccccccatggatggctcacctgggaaatacatgagccacctggcgtcctgcgggatgggcctgctgctcactgtggacccaggaagcgggacggtgctgtggacacaggacctgggcgtgcctgtgatgggcgtctacacctggcaccaggacggcctgcgccagctgccgcatctcacgctggctcgagacactctgcatttcctcgccctccgctggggccacatccgactgcctgcctcaggcccccgggacacagccaccctcttctctaccttggacacccagctgctaatgacgctgtatgtggggaaggatgaaactggcttctatgtctctaaagcactggtccacacaggagtggccctggtgcctcgtggactgaccctggcccccgcagatggccccaccacagatgaggtgacactccaagtctcaggagagcgagagggctcacccagcactgctgttagatacccctcaggcagtgtggccctcccaagccagtggctgctcattggacaccacgagctacccccagtcctgcacaccaccatgctgagggtccatcccaccctggggagtggaactgcagagacaagacctccagagaatacccaggccccagccttcttcttggagctattgagcctgagccgagagaaactttgggactccgagctgcatccagaagaaaaaactccagactcttacttggggctgggaccccaagacctgctggcagctagcctcactgctgtcctcctgggagggtggattctctttgtgatgaggcagcaacagccgcaggtggtggagaagcagcaggagacccccctggcacctgcagactttgctcacatctcccaggatgcccagtccctgcactcgggggccagccggaggagccagaagaggcttcagagtccctcaaagcaagcccagccactcgacgaccctgaagctgagcaactcaccgtagtggggaagatttccttcaatcccaaggacgtgctgggccgcggggcaggcgggactttcgttttccggggacagtttgagggacgggcagtggctgtcaagcggctcctccgcgagtgctttggcctggttcggcgggaagttcaactgctgcaggagtctgacaggcaccccaacgtgctccgctacttctgcaccgagcggggaccccagttccactacattgccctggagctctgccgggcctccttgcaggagtacgtagaaaacccggacctggatcgcgggggtctggagcccgaggtcgtgctgcagcagctgatgtctggcctggcccacctgcactctttacacatagtgcaccgggacctgaagccaggaaatattctcatcaccgggcctgacagccagggcctgggcagagtggtgctctcagacttcggcctctgcaagaagctgcctgctggccgctgtagcttcagcctccactccggcatccccggcacggaaggctggatggcgcccgagcttctgcagctcctgccaccagacagtcctaccagcgctgtggacatcttctctgcaggctgcgtgttctactacgtgctttctggtggcagccacccctttggagacagtctttatcgccaggcaaacatcctcacaggggctccctgtctggctcacctggaggaagaggtccacgacaaggtggttgcccgggacctggttggagccatgttgagcccactgccgcagccacgcccctctgccccccaggtgctggcccaccccttcttttggagcagagccaagcaactccagttcttccaggacgtcagtgactggctggagaaggagtccgagcaggagcccctggtgagggcactggaggcgggaggctgcgcagtggtccgggacaactggcacgagcacatctccatgccgctgcagacagatctgagaaagttccggtcctataaggggacatcagtgcgagacctgctccgtgctgtgaggaacaagaagcaccactacagggagctcccagttgaggtgcgacaggcactcggccaagtccctgatggcttcgtccagtacttcacaaaccgcttcccacggctgctcctccacacgcaccgagccatgaggagctgcgcctctgagagcctcttcctgccctactacccgccagactcagaggccaggaggccatgccctggggccacagggaggtgaggtgggctggatgccacacagatggtctccgtgctggctcactgaagagctgagcctgtggctggcctcagaatcaggctgggtgcagtggctcacacctgtaatcccagcattttgggaggctgagtgagaggatcacttgagctcaggagttcgagaccagcctggccaacatggcaacaccccatttctacaaaaaatttgtaaaattagccaggcatggtggcgcacgcctgtagtcccagctgcttgggaggctgaggtgggagaatcacttgagcccaggagttcgaggctgcagtgagccaggatcatgccactgcactccagcctggtccacagagagacactgtcaccccctttcccccacaagactggcagaggctgggcagcctggggctgatgaagcagagatgttcgctggatcccaggccctggcacccctcaggaaatacaagaaaaagaatattcacatctgtttaatgtgcataaagccaaggaaaggacagttccgaattcaatagaaaaaaaaaaaaaaaa

SEQ ID NO: 3 - DNA, 5735 bp, Homo sapiens
gcgtcccttggcttccgacatcccgtctggccgtccccctgtgccggtccgagcctctgtttatttcctttcctactatcaatactcgaccagcagaaaaggaaagtttaaaaatgccaatcgcacagttgctggaactatggaaaaagatcgaggtggagcctatggaaatagagaccacagaggaggatctcaacctggatgtggagcccaccacagaagacactgcagaagaagaagaaggcgtcgtgaaggagatagacatcagccatcatgtgaaggagggctttgagaaggcagatccttcccagtttgagctgctgaaggttttaggacaaggatcctatggaaaggtgttcctggtgaggaaggtgaaggggtccgacgctgggcagctctacgccatgaaggtccttaagaaagccaccctaaaagttcgggaccgagtgagatcgaagatggagagagacatcttggcagaagtgaatcaccccttcattgtgaagcttcattatgcctttcagacggaaggaaagctctacctgatcctggacttcctgcggggaggggacctcttcacccggctctccaaagaggtcatgttcacggaggaggatgtcaagttctacctggctgagctggccttggctttagaccatctccacagcctggggatcatctacagagatctgaagcctgagaacatcctcctggatgaagaggggcacattaagatcacagatttcggcctgagtaaggaggccattgaccacgacaagagagcgtactccttctgcgggacgatcgagtacatggcgcccgaggtggtgaaccggcgaggacacacgcagagtgccgactggtggtccttcggcgtgctcatgtttgagatgctcacggggtccctgccgttccaggggaaggacaggaaggagaccatggctctcatcctcaaagccaagctggggatgccgcagttcctcagtggggaggcacagagtttgctgcgagctctcttcaaacggaacccctgcaaccggctgggtgctggcattgacggagtggaggaaattaagcgccatcccttctttgtgaccatagactggaacacgctgtaccggaaggagatcaagccaccgttcaaaccagcagtgggcaggcctgaggacaccttccactttgaccccgagttcacagcgcggacgcccacagactctcctggcgtccccccgagtgcaaacgctcatcacctgtttagaggattcagctttgtggcctcaagcctgatccaggagccctcacagcaagatctgcacaaagtcccagttcacccaatcgtgcagcagttacacgggaacaacatccacttcaccgatggctacgagatcaaggaggacatcggggtgggctcctactcagtgtgcaagcgatgtgtgcataaagccacagacaccgagtatgccgtgaagatcattgataagagcaagagagacccctcggaagagattgagatcctcctgcggtacggccagcacccgaacatcatcaccctcaaggatgtctatgatgatggcaagtttgtgtacctggtaatggagctgatgcgtggtggggagctcctggaccgcatcctccggcagagatacttctcggagcgcgaagccagtgacgtcctgtgcaccatcaccaagaccatggactacctccattcccagggggttgttcatcgagacctgaagccgagtaacatcctgtacagggatgagtcggggagcccagaatccatccgagtctgcgacttcggctttgccaagcagctgcgcgcggggaacgggctgctcatgacaccctgctacacggccaatttcgtggccccggaggtcctgaagcgtcaaggctatgatgcggcgtgtgacatctggagtttggggatcctgttgtacaccatgctggcaggatttaccccttttgcaaatgggccagacgatacccctgaggagattctggcgcggatcggcagtgggaagtatgccctttctgggggaaactgggactcgatatctgacgcagctaaagacgtcgtgtccaagatgctccacgtggaccctcatcagcgcctgacggcgatgcaagtgctcaaacacccgtgggtggtcaacagagagtacctgtccccaaaccagctcagccgacaggacgtgcacctggtgaagggcgcgatggccgccacctactttgctctaaacagaacacctcaggccccgcggctggagcccgtgctgtcatccaacctggctcagcgcagaggcatgaagagactcacgtccacgcggctgtagcgggtgggaccctggccccagcgtcccctgccagcatcctcgtgggctcacagaccccggcctcggagcccgtctggcacccagagtgaccacaagtccagcagggaggcggcgcccgccctcgccgtgtccgtgttttctttttcagccccggagagggtcctgacctgggggcttctccaagcctcactgcgccagcctccccgcccgctctcttttctcccaagcgaaaccaaatgcgccccttcacctcgcgtgcccgtgcgaggccgggggcttctttcagagcccgcgggtcctctcatacatggcttctgtttctgccgagagatctgttttccaattatgaagccggtcggtttggtcagactcccgacacccacgtcccaggtacccggtgggaaagtggcagtgcgagggcgcagccattggtggttgcagggccccagagggctggggtgacctggcatcccggggctccccacgggctggatgacggggttggcactgtggcgtccaggaggagatgcctggttctgcccaaaataatccaaagagccgtttcctcctcgcccttcagtttttgcctgaggtgctgggtagcccatcctttcctctgtcccagattcaaatgaggagtaagagcccagacgagaggaaggcaggctggatctttgccttgagagctccgtgtcaccaggatggaagggggtgcctctcggaggagcctgtgtccacctccagtctcggctttccccggggggccaagcgcactgggctgccgtctgtccccagctcccgtggccacacagctatctggaggctttgcagggagtcgtgggttctcgcacctgctcagccctgtgtcggcttcctgtgtgctcacctaaagctgtggttttgctgtgttcacttcgatttttctggtctgtggagaaactgtgaattggagaaatggagctctgtggcttcccacccaaaccttctcagtccagctggaggctggagggagacacaggccccacccagcagactgaggggcagaggcacaggtgggagggcagcggagatcagcgtggacaggagcgatgcactttgtagatgctgtggctttgtgttgcgttttgtgtctctgttgcacagatctgttttttcacactgatccgtattcccctgggtgtgcacacagggcgggtgtggggcatttaggccatgctgtgctctacttcattgagtaaaatcgagtgagaggttccgggcagcaggatcgacgcccagtccagccggcagagggaacacacgggtccttcattgtcctgtaagggtgttgaagatgctccctggcggcccccaagcagactagatgggaggaggcgccgctcagcccctcaccctgcatcactgaagagcggcgcctctgcagcaagcagggcttcaggaggtgcccgctggccacagccaggttttccctaagaagatgttattttgttgggttttgttccccctccatctcgattctcgtacccaactaaaaaaaaaaaaataaagaaaaaatgtgctgcgttctgaaaaataactccttagcttggtctgattgttttcagaccttaaaatataaacttgtttcacaagctttaatccatgtggattttttttttcttagagaaccacaaaacataaaaggagcaagtcggactgaatacctgtttccatagtgcccacagggtattcctcacattttctccatagaagatgctttttcccaaggctagaacgacttccaccatgatgaatttgctttttaggtcttaattatttcacttctttttagaaacttaggaagaagtggataatcctgaggtcacacaatctgtcctcccagaaatgaacaaaagtcatcaccttttctgcttgctacacaggcaacgattcccccatcagctgcccggaccctttggcctggcttggtgtgcaggcctgtctgtttgcttaaagtcagtgggttctggtgcagggagtgagaagtgggggaagtgaaagggaaagcatccgtgagaaagcggccacggttttccctccttgtgtgcccatggggcaccagctcatggtctttttcagtcatcccagtttgtacagacttagcttctgaactctaagaatgccaaagggaccgacgagactccccatcacagcgagctctgtccttacatgtatttgatgtgcatcagcggaggagaacactggcttggccctgctccgctgagtgtctgtgaaatacctctactttccctcccatatccagaacaaaatgatacttgacatccttccacaaaagtcagcctaaagaagttatggtatcatatgttaaactaagctttcaaaaaccttagtgaaatagcaagtgactgctttcaagcagcagtcgacatgtaaatgaaggtgttcttagaattcgcattttgccagctcagcgcacctccacaacgaatgaaatgctccgtatgatttgcacaaatgacatagacctccccaaaagttaactggctctccttcctcacacagttcatcataacccaaccccccacccccgggtcatgaaaatcacagaacttataaacacattgaaccctagatctcaggcttcctgacctaccgccagtggccccttgctggccaccctatagggtcctccttccctggcagccccccatgtgggagaaatacctgattctcccaatctgcagtgggagagctttgctgaattccatcccaaagtcaaacatgggcaagaggtgaggatttcacttttaccctcaagtccgatttgtctgtgattttaaactaactgtgtatgtattgatgtttggaagattgtttgaattttaaagtgataatagtacttaatgttatccagtattgttcattaaatggtgttatcctaaagctgcacttgggatttttacctaacgctttactgattctctcaagcacatggcaaagtttgatttgcactccgttcatttctgacacgttttgctgcctcctacctttctaagcgtcatgcaaattcgagaatggagaaggacgctgccggtccctgagcggtgtggagagggcggaaggtggactccagcgcagcttgaggggctgaggacggaggctgcagcatctgtgtcgttctactgagcacgcttctctgcctcgctcctgactcagcactttgttcactggctcagcagttatgtttacacatcatttttatgttcctgctttgtaattcatgtttgagatgggtggccactgtacagatatttattacgctttccagactttctgaatagatttttttgaataaacatggttttatgaagtgtaatctttttctagcctaacaat

SEQ ID NO: 4 - DNA, 8490 bp, Homo sapiens
atggcggcggcggcgggcggcggcagttgccccgggcctggctccgcgcggggccgcttcccgggccggccgcggggcgccggcgggggcgggggccgcggcggacggggcaacggggccgaaagagtgcgggtagctctgcggcgcggcggtggcgcgacggggccgggcggagccgagcccggggaggacacggccctgctccgtttgctggggctccgccggggcctgcgccggctccgccgcctgtgggccggcccgcgggtccagcggggccggggacggggtcggggccggggctggggcccgagtcgaggctgcgtgccggaggaggagagcagtgacggggaatccgacgaggaggagtttcagggttttcattcagatgaagatgtggcccccagttccctgcgctctgcgctccgatcccagcgaggtcgagcgccccgaggtcggggtcgcaagcataagacgaccccccttcctcctcctcgcctagcagatgtggctcctacccccccaaagacccctgcccggaaacggggtgaggaaggcacagaacggatggtgcaggcactgactgaacttctccggcgggcccaggcaccccaagcaccccggagccgggcatgtgagccctccaccccccggcggtctcggggacggcccccaggacggccagcaggcccctgcaggaggaagcagcaagcagtagtggtggcagaagcagctgtgacaatccccaaacctgagcccccacctcctgtggttccagtgaaacatcagactggcagctggaaatgcaaggaggggcccggtccaggacctgggacccccaggcgtggaggacagtcaagccgtggaggccgtggaggcaggggccgcggccgaggtggtgggctcccctttgtgatcaagtttgtttcaagggccaaaaaagtaaagatgggacaattgtccttgggactcgaatcaggtcaaggtcaaggtcaacatgaggaaagttggcaggatgtcccccaaagaagagttggatctggacagggagggagcccttgctggaaaaagcaggaacagaagctggatgacgaggaagaagagaagaaagaagaagaagaaaaagacaaggagggagaagagaaggaagaaagagctgtagctgaggagatgatgccagctgcggaaaaggaagaggcaaagctgccaccaccgcctctgactcctccagccccttcacctcctccacccctcccacccccttcgacatctcctccacccccactctgccctccaccaccacccccagtgtccccaccacctctaccatcccctccaccgcctcctgcccaagaggagcaggaggaatcccctcctcctgtggtcccagctacgtgctccaggaagaggggccggcctcccctgactcccagccagcgggcggagcgggaagctgctcgggcagggccagagggcacctctcctcccactccaacccccagcaccgccacgggaggccctccggaagacagtcccaccgtggcccccaaaagcaccaccttcctgaagaatatccggcagtttattatgcctgtggtgagtgcccgctcctcccgtgtcatcaagacaccccggcgatttatggatgaagacccccccaaacccccaaaggtggaggtctcacctgtcctgcgacctcccattaccacctccccacctgttccccaggagccagcaccagtcccctctccaccacgtgccccaactcctccatctaccccagttccactccctgagaagagacggtccatcctaagggaacccacatttcgctggacctcactgacccgggagctgccccctcctcccccagcccctccacctcccccggccccctccccaccccctgctcctgccacctcctcccggaggcccctactccttcgggcccctcagtttaccccaagcgaagcccacctgaagatctacgaatcggtgcttactcctcctcctcttggggctcctgaagcccctgagccagagcctcctcctgccgatgactctccagctgagcctgagcctcgggcagtgggccgcaccaaccacctcagcctgcctcgattcgcccctgtggtcaccactcctgttaaggccgaggtgtcccctcacggggctccagctctgagcaacgggccacagacacaggctcagctactgcagcccctgcaggccttgcaaacccagctcctgccccaggcactaccgccaccacagccacagctgcagccaccgccgtcaccacagcagatgcctcccctggaaaaagcccggattgcgggcgtgggttccttgccgctgtctggggtagaggagaagatgttcagcctcctcaagagagccaaagtgcagctattcaagatcgatcagcagcagcagcagaaggtggcagcttccatgccgctgagccctggagggcagatggaggaggtggccggggctgtcaagcagatctccgacagaggccctgtccggtctgaagatgagtcggtggaagctaagagagagcggccctcaggtcccgagtcccctgtgcaaggtccccgcatcaaacatgtctgccgtcatgctgctgtggccctgggtcaggcccgggccatggtgcctgaagatgtccctcgcctcagtgccctccctctccgggatcggcaggacctcgccacagaggatacatcatcggcgtccgagactgagagtgtcccgtcacggtcccggcggggaaaggtggaggcagcaggccctgggggagaatcagagcccacaggttctggagggaccctggcccacacaccccggcgctcactgccctcccatcacggcaagaagatgcgcatggctcgatgtggacactgtcggggctgcctacgtgtgcaggactgtgggtcctgtgtcaactgcctagacaagcccaagtttgggggccctaacaccaagaagcagtgctgtgtataccggaagtgtgacaaaatagaggctcggaagatggaacgactggctaaaaaaggccggacgatagtgaagacgctgttgccctgggattccgatgaatctcctgaggcctcccctggtcctccaggcccacgccggggggcgggagctggggggccccgggaggaggtggtggcccacccagggcccgaggagcaggactccctcctgcagcgcaagtcagctcggcgctgcgtcaaacagcgaccctcctatgatatcttcgaggattcggatgactcggagcccgggggcccccctgctcctcggcgtcggaccccccgagaaaatgagctgccactgccagaacctgaggagcagagccggccccgcaaacctaccctgcagcctgtgttgcagctcaaggcccgaaggcgcctggacaaggatgctttggcccctggcccctttgcttcttttcccaatggctggactggaaagcagaagtctcccgatggtgtgcaccgcgtccgtgtggattttaaggaggattgtgatttagagaacgtgtggctgatggggggcctgagtgtgctcacctctgtgccagggggccccccgatggtgtgcttgctgtgtgccagcaaaggactccacgagctggtgttctgtcaagtctgctgtgacccattccacccattctgcctggaggaggccgagcggcccctgccccagcatcacgacacctggtgctgccgtcgctgcaaattctgccacgtctgtggacgcaaaggtcgtggatccaagcacctcctggagtgcgagcgctgccgccatgcataccacccggcctgtctggggcccagctatccaacccgggccacgcgcaaacggcgccactggatctgttcagcctgtgtgcgctgtaagagctgtggggcaactccaggcaagaactgggacgtcgagtggtctggagattacagcctctgccccaggtgcacccagctatatgagaaaggaaactactgcccgatctgtacacgctgctatgaagacaacgactatgagagcaagatgatgcagtgcgcacagtgcgatcactgggtgcatgccaagtgcgaggggctctcagatgaagactacgagatcctttcaggactgccagactcggtgctgtacacctgcggaccgtgtgctggggcagcgcagccccgctggcgagaggccctgagcggggccctccaggggggcctgcgccaggtgctccagggcctgctgagctccaaggtggtgggcccactgctgctctgcacccagtgtgggccagatgggaagcaactgcacccaggaccctgcggcctgcaagctgtgagtcagcgcttcgaggatggccactacaagtctgtgcacagcttcatggaggacatggtgggcatcctcatgcggcactcggaggagggagagaccccggaccgccgggctggaggccagatgaaggggctcctgctgaagctgctagaatctgcgttcggctggttcgacgcccacgaccccaagtactggcgacggagtacccggctgccaaacggagtccttcccaatgcggtgttgcccccatccctggatcatgtctatgcgcagtggagacagcaggaaccagagaccccagaatcagggcagcctccaggggatccctcagcagcattccagggcaaggatccggctgccttctcacacctggaggacccccgtcagtgtgcactctgcctcaaatacggggatgcagactccaaggaggcggggcggctcttgtacatcgggcagaacgagtggacacacgtcaactgtgccatctggtcggcggaagtcttcgaggagaacgacggctccctcaagaatgtgcatgctgctgtggcccgagggaggcagatgcgctgcgagctctgcctgaagcctggcgccacggtgggctgctgcctgtcctcctgcctcagcaacttccacttcatgtgtgcccgggccagctactgcatcttccaggatgacaagaaagtcttctgccagaaacacactgatctcctggatggcaaggaaattgtgaaccccgatggttttgatgttctccgccgagtctatgtggacttcgagggcatcaacttcaagcggaagttcttgacggggcttgaacccgatgccatcaacgtgctcattggttccatccgcattgactccctgggtactctgtctgatctctcggactgcgagggacggctcttccccattggctaccagtgctcccgtctgtactggagcacagtggatgctcggaggcgctgctggtatcggtgccgaattctggagtatcggccatgggggccgagggaagagccagctcacctggaggctgcagaggagaaccagaccattgtgcacagccccgccccttcctcagagcccccaggtggtgaggaccccccactggacacagatgttcttgtccctggagctcctgagcgccactcgcccattcagaacctggaccctccactgcggccagattcaggcagcgcccctcctccagccccccgttctttttcgggggctcgaatcaaagtgcccaactactcgccatcccggaggcccttggggggtgtctcctttggccccctgccctcccctggaagtccatcttcactgacccaccacatccccacagtgggagacccggacttcccagctccccccagacgttcccgtcgtcccagccctttggctcccaggccgcctccatcacggtgggcctcccctcctctaaaaacctcccctcagctcagggtgccccctcctacctcagtcgtcacagccctcacacctacctcaggggagctggctccccctggcccggccccatctccaccaccccctgaagacctgggcccagacttcgaggacatggaggtggtgtcaggactgagtgctgctgacctggacttcgcggccagcctgctggggactgagcccttccaggaagagattgtagccgctggggccatggggagcagccacgggggcccgggggacagctccgaggaggagtccagccccacctcccgctacatccacttccctgtgactgtggtgtccgcccctggtctggcccccagcgctacccctggagccccccgcattgaacagctggacggcgtggacgacggcactgacagtgaggctgaggcggtgcagcagcctcggggccagggcacgcctccttcggggccaggagtagtccgggcaggggtccttggggctgcaggggacagggcccggcctcctgaggacctgccatcggaaattgtggattttgtgttgaagaacctagggggtcctggggatggaggtgctggccctagagaggagtcactccccccggcgcctcccctggctaatggcagccagccctcccaaggcctgaccgccagcccagctgaccccacccgcacatttgcctggctcccaggggccccaggggtccgggtgttaagccttggccctgcccctgagccccccaaacccgccacatccaaaatcatacttgtcaacaagctggggcaagtatttgtgaagatggctggggagggtgaacctgtcccacccccagtgaagcagccacctttgccccccaccatttcccccacggctcccacctcctggactctgcccccaggccccctcctcggcgtgctgcccgtggtcggagtggtccgccctgccccgcccccgccaccccctcccctgacgctggtgctgagcagtgggccagccagcccgccccgccaggccatccgcgtcaagagggtgtccactttctccggccggtccccgccagcacctcccccatacaaagccccccggctggatgaagatggagaggcctcagaggatacccctcaggttccagggcttggcagtggcgggtttagccgtgtgaggatgaaaacccccacagtgcgtggggtccttgacctggatcggcctggggagcccgctggggaagaaagtcctgggcccctccaggaacggtcccctttgctgccacttccggaagatggtcctccccaggtccccgatggtcccccagacctgctgcttgagtcccagtggcaccactattcaggtgaggcttcgagctctgaggaagagcctccatccccagatgataaagagaaccaggccccaaaacggactggcccacatctgcgcttcgagatcagcagtgaggatgggttcagcgttgaggcagagagcttggagggggcgtggagaactctgatcgagaaagtgcaagaggcccgagggcatgcccgactcagacatctctcctttagtggaatgagtggggcgagactcctgggcatccaccatgatgctgtcatcttcctggccgagcagctccccggagcccagcgttgccagcactataagttccgttaccaccagcagggagagggccaggaggagccgcccctgaatccccatggggctgctcgggcagaggtctatctccggaagtgcacctttgacatgttcaacttcctggcctcccagcaccgggtgctccctgagggggccacctgtgatgaggaagaggatgaggtgcagctcaggtcaaccagacgtgccaccagcctggagctgcccatggccatgcgttttcgtcaccttaagaagacgtccaaagaagctgtgggtgtctacagatcagccatccacgggcgaggcctgttctgtaagcgcaacatcgacgcgggggagatggtcatcgagtactctggcattgtcatccgctcggtgttgactgacaagcgggagaagttctacgatgggaagggcatcgggtgctatatgttccgcatggatgactttgatgtagtggacgccacgatgcatggcaatgccgcccgcttcatcaaccactcctgtgagcccaactgcttctctcgggtcatccacgtggagggccagaaacacattgttatcttcgccctgcgccgcatcctgcgtggtgaggagctcacctacgactacaagttccccatcgaggatgccagcaacaagctgccctgcaactgtggcgccaagcgctgccgtcggttccttaactgaggccgtggctgcccaccacgacccctcacacctcctgctgccgtcgctgccatcttgcccctagcctgggggctccctagcccctcccagagcatctcacccccaccctcatgttcagggtggatgtgggcatgcaggtgacaagggccctgcctccacccctccagcccatccagcaatcgccccctttctgccctgggggcccaggatgtagatattgtacaaaggtttctaaatcccttcttttctatgcacttttttatttaagaggtggggtcccaggtgggaacccccccacaataaagtctgtcaatgtttggagaaaaaaaaaaaaaaaaaaaa

SEQ ID NO: 5 - DNA, 7289 bp, Homo sapiens
ccagccccatttaacttcgcggcggcggcggcgactgcggcgccgcgggctggaggccggcgtcggggaaggtcctggtgccggattccgcacgaggtgttgacgggcggcttctgccaacttctccccagcgcgcgccgagcccgcgcggccccggggctgcacgtcccagatacttctgcggcgcaaggctacaactgagacccggaggagactagaccccatggcttcctggacgagcccctggtgggtgctgatagggatggtcttcatgcactctcccctcccgcagaccacagctgagaaatctcctggagcctatttccttcccgagtttgcactttctcctcagggaagttttctggaagacacaacaggggagcagttcctcacttatcgctatgatgaccagacctcaagaaacactcgttcagatgaagacaaagatggcaactgggatgcttggggcgactggagtgactgctcccggacctgtgggggaggagcatcatattctctgcggagatgtttgactggaaggaattgtgaagggcagaacattcggtacaagacatgcagcaatcatgactgccctccagatgcagaagatttcagagcccagcagtgctcagcctacaatgatgtccagtatcaggggcattactatgaatggcttccacgatataatgatcctgctgccccgtgtgcactcaagtgtcatgcacaaggacaaaacttggtggtggagctggcacctaaggtactggatggaactcgttgcaacacggactccttggacatgtgtatcagtggcatctgtcaggcagtgggctgcgatcggcaactgggaagcaatgccaaggaggacaactgtggagtctgtgccggcgatggctccacctgcaggcttgtacggggacaatcaaagtcacacgtttctcctgaaaaaagagaagaaaatgtaattgctgttcctttgggaagtcgaagtgtgagaattacagtgaaaggacctgcccacctctttattgaatcaaaaacacttcaaggaagcaaaggagaacacagctttaacagccccggcgtctttctcgtagaaaacacaacagtggaatttcagaggggctccgagaggcaaacttttaagattccaggacctctgatggctgatttcatcttcaagaccaggtacactgcagccaaagacagcgtggttcagttcttcttttaccagcccatcagtcatcagtggagacaaactgacttctttccctgcactgtgacgtgtggaggaggttatcagctcaattctgctgaatgtgtggatatccgcttgaagagggtagttcctgaccattattgtcactactaccctgaaaatgtaaaaccaaaaccaaaactgaaggaatgcagcatggatccctgcccatcaagtgatggatttaaagagataatgccctatgaccacttccaacctcttcctcgctgggaacataatccttggactgcatgttccgtgtcctgtggaggagggattcagagacggagctttgtgtgtgtagaggaatccatgcatggagagatattgcaggtggaagaatggaagtgcatgtacgcacccaaacccaaggttatgcaaacttgtaatctgtttgattgccccaagtggattgccatggagtggtctcagtgcacagtgacttgtggccgagggttacggtaccgggttgttctgtgtattaaccaccgcggagagcatgttgggggctgcaatccacaactgaagttacacatcaaagaagaatgtgtcattcccatcccgtgttataaaccaaaagaaaaaagtccagtggaagcaaaattgccttggctgaaacaagcacaagaactagaagagaccagaatagcaacagaagaaccaacgttcattccagaaccctggtcagcctgcagtaccacgtgtgggccgggtgtgcaggtccgtgaggtgaagtgccgtgtgctcctcacattcacgcagactgagactgagctgcccgaggaagagtgtgaaggccccaagctgcccaccgaacggccctgcctcctggaagcatgtgatgagagcccggcctcccgagagctagacatccctctccctgaggacagtgagacgacttacgactgggagtacgctgggttcaccccttgcacagcaacatgcgtgggaggccatcaagaagccatagcagtgtgcttacatatccagacccagcagacagtcaatgacagcttgtgtgatatggtccaccgtcctccagccatgagccaggcctgtaacacagagccctgtccccccaggtggcatgtgggctcttgggggccctgctcagctacctgtggagttggaattcagacccgagatgtgtactgcctgcacccaggggagacccctgcccctcctgaggagtgccgagatgaaaagccccatgctttacaagcatgcaatcagtttgactgccctcctggctggcacattgaagaatggcagcagtgttccaggacttgtggcgggggaactcagaacagaagagtcacctgtcggcagctgctaacggatggcagctttttgaatctctcagatgaattgtgccaaggacccaaggcatcgtctcacaagtcctgtgccaggacagactgtcctccacatttagctgtgggagactggtcgaagtgttctgtcagttgtggtgttggaatccagagaagaaagcaggtgtgtcaaaggctggcagccaaaggtcggcgcatccccctcagtgagatgatgtgcagggatctaccagggctccctcttgtaagatcttgccagatgcctgagtgcagtaaaatcaaatcagagatgaagacaaaacttggtgagcagggtccgcagatcctcagtgtccagagagtctacattcagacaagggaagagaagcgtattaacctgaccattggtagcagagcctatttgctgcccaacacatccgtgattattaagtgccccgtgcgacgattccagaaatctctgatccagtgggagaaggatggccgttgcctgcagaactccaaacggcttggcatcaccaagtcaggctcactaaaaatccatggtcttgctgcccccgacatcggcgtgtaccggtgcattgcaggctctgcacaggaaacagttgtgctcaagctcattggtactgacaaccggctcatcgcacgcccagccctcagggagcctatgagggaatatcctgggatggaccacagcgaagccaatagtttgggagtcacatggcacaaaatgaggcaaatgtggaataacaaaaatgacctttatctggatgatgaccacattagtaaccagcctttcttgagagctctgttaggccactgcagcaattctgcaggaagcaccaactcctgggagttgaagaataagcagtttgaagcagcagttaaacaaggagcatatagcatggatacagcccagtttgatgagctgataagaaacatgagtcagctcatggaaaccggagaggtcagcgatgatcttgcgtcccagctgatatatcagctggtggccgaattagccaaggcacagccaacacacatgcagtggcggggcatccaggaagagacacctcctgctgctcagctcagaggggaaacagggagtgtgtcccaaagctcgcatgcaaaaaactcaggcaagctgacattcaagccgaaaggacctgttctcatgaggcaaagccaacctccctcaatttcatttaataaaacaataaattccaggattggaaatacagtatacattacaaaaaggacagaggtcatcaatatactgtgtgaccttattacccccagtgaggccacatatacatggaccaaggatggaaccttgttacagccctcagtaaaaataattttggatggaactgggaagatacagatacagaatcctacaaggaaagaacaaggcatatatgaatgttctgtagctaatcatcttggttcagatgtggaaagttcttctgtgctgtatgcagaggcacctgtcatcttgtctgttgaaagaaatatcaccaaaccagagcacaaccatctgtctgttgtggttggaggcatcgtggaggcagcccttggagcaaacgtgacaatccgatgtcctgtaaaaggtgtccctcagcctaatataacttggttgaagagaggaggatctctgagtggcaatgtttccttgcttttcaatggatccctgttgttgcagaatgtttcccttgaaaatgaaggaacctacgtctgcatagccaccaatgctcttggaaaggcagtggcaacatctgtactccacttgctggaacgaagatggccagagagtagaatcgtatttctgcaaggacataaaaagtacattctccaggcaaccaacactagaaccaacagcaatgacccaacaggagaacccccgcctcaagagcctttttgggagcctggtaactggtcacattgttctgccacctgtggtcatttgggagcccgcattcagagaccccagtgtgtgatggccaatgggcaggaagtgagtgaggccctgtgtgatcacctccagaagccactggctgggtttgagccctgtaacatccgggactgcccagcgaggtggttcacaagtgtgtggtcacagtgctctgtgtcttgcggtgaaggataccacagtcggcaggtgacgtgcaagcggacaaaagccaatggaactgtgcaggtggtgtctccaagagcatgtgcccctaaagaccggcctctgggaagaaaaccatgttttggtcatccatgtgttcagtgggaaccagggaaccggtgtcctggacgttgcatgggccgtgctgtgaggatgcagcagcgtcacacagcttgtcaacacaacagctctgactccaactgtgatgacagaaagagacccaccttaagaaggaactgcacatcaggggcctgtgatgtgtgttggcacacaggcccttggaagccctgtacagcagcctgtggcaggggtttccagtctcggaaagtcgactgtatccacacaaggagttgcaaacctgtggccaagagacactgtgtacagaaaaagaaaccaatttcctggcggcactgtcttgggccctcctgtgatagtacgtacacctcccagaccgctacaaacaaaggtgctgccagtcatgtcaagagggataaacctttggaggggtcatgatgctgctgtgaagataaaagtagaatataaaagctcttttccccatgtcgctgattcaaaaacatgtatttcttaaaagactagattctatggatcaaacagaggttgatgcaaaaacaccactgttaaggtgtaaagtgaaattttccaatggtagttttatattccaattttttaaaatgatgtattcaaggatgaacaaaatactatagcatgcatgccactgcacttgggacctcatcatgtcagttgaatcgagaaatcaccaagattatgagtgcatcctcacgtgctgcctctttcctgtgatatgtagactagcacagagtggtacatcctaaaaacttgggaaacacagcaacccatgacttcctcttctctcaagttgcaggttttcaacagttttataaggtatttgcattttagaagctctggccagtagttgttaagatgttggcattaatggcattttcatagatccttggtttagtctgtgaaaaagaaaccatctctctggataggctgtcacactgactgacctaagggttcatggaagcatggcatcttgtccttgcttttagaacacccatggaagaaaacacagagtagatattgctgtcatttatacaactacagaaatttatctatgacctaatgaggcatctcggaagtcaaagaagagggaaagttaaccttttctactgatttcgtagtatattcagagctttcttttaagagctgtgaatgaaactttttctaagcactattctattgcacacaaacagaaaaccaaagccttattagacctaatttatgcataaagtagtattcctgagaactttattttggaaaatttataagaaagtaatccaaataagaaacacgatagttgaaaataatttttatagtaaataattgttttgggctgatttttcagtaaatccaaagtgacttaggttagaagttacactaaggaccaggggttggaatcagaatttagtttaagatttgaggaaaagggtaagggttagtttcagttttaggattagagctagaattgggttaggtgagaaagaaagttaaggttaaggctagagttgtctttaagggttagggttaggaccaggttaggtcagggttggattgggtttagattggggccagtgctggtgttagtgatagtgtcaggatggaggttaggtttggagtaagcgttgttgctgaagtgagttcaggctagcattaaattgtaagttctgaagctgatttggttatggggtctttcccctgtatactaccagttgtgtctttagatggcacacaagtccaaataagtggtcatacttctttattcagggtctcagctgcctgtacacctgctgcctacatcttcttggcaacaaagttacctgccacaggctctgctgagcctagttcctggtcagtaataactgaacagtgcattttggctttggatgtgtctgtggacaagcttgctgagtttctctaccatattctgagcacacggtctcttttgttctaacttcagcttcactgacactgggttgagcactactgtatgtggagggtttggtgattgggaatggatgggggacagtgaggaggacacaccagcccattagttgttaatcatcaatcacatctgattgttgaaggttattaaattaaaagaaagatcatttgtaacatactctttgtatatatttattatatgaaaggtgcaatattttattttgtacagtatgtaataaagacatgggacatatatttttcttattaacaaaatttcatattaaattgcttcactttgtatttaaagttaaaagttactatttttcatttgctattgtactttcattgttgtcattcaattgacattcctgtgtactgtattttactactgtttttataacatgagagttaatgtttctgtttcatgatccttatgtaattcagaaataaatttactttgattattcagtggcatccttataaa

SEQ ID NO: 6 - DNA, 8258 bp, Homo sapiens
ttccgggaggagttttggcctccacacggctccgtcgggcgccgcgctcttccggcagcggtagctttggagacgccgggaacccgcgttggcgtggttgactagtgcctcgcagcctcagcatgggggaacatggcctggagctggcttccatgatccccgccctgcgggagctgggcagtgccacaccagaggaatataatacagttgtacagaagccaagacaaattctgtgtcaattcattgaccggatacttacagatgtaaatgttgttgctgtagaacttgtaaagaaaactgactctcagccaacctccgtgatgttgcttgatttcatccagcatatcatgaaatcctccccacttatgtttgtaaatgtgagtggaagccatgaggccaaaggcagttgtattgaattcagtaattggatcataacgagacttctgcggattgcagcaactccctcctgtcatttgttacacaagaaaatctgtgaagtcatctgttcattattatttctttttaaaagcaagagtcctgctatttttggggtactcacaaaagaattattacaactttttgaagacttggtttacctccatagaagaaatgtgatgggtcatgctgtggaatggccagtggtcatgagccgatttttaagtcaattagatgaacacatgggatatttacaatcagctcctttgcagttgatgagtatgcaaaatttagaatttattgaagtcactttattaatggttcttactcgtattattgcaattgtgttttttagaaggcaagaactcttactttggcagataggttgtgttctgctagagtatggtagtccaaaaattaaatccctagcaattagctttttaacagaactttttcagcttggaggactaccagcacaaccagctagcacttttttcagctcatttttggaattattaaaacaccttgtagaaatggatactgaccaattgaaactctatgaagagccattatcaaagctgataaagacactatttccctttgaagcagaagcttatagaaatattgaacctgtctatttaaatatgctgctggaaaaactctgtgtcatgtttgaagacggtgtgctcatgcggcttaagtctgatttgctaaaagcagctttgtgccatttactgcagtatttccttaaatttgtgccagctgggtatgaatctgctttacaagtcaggaaggtctatgtgagaaatatttgtaaagctcttttggatgtgcttggaattgaggtagatgcagagtacttgttgggcccactttatgcagctttgaaaatggaaagtatggaaatcattgaggagattcaatgccaaactcaacaggaaaacctcagcagtaatagtgatggaatatcacccaaaaggcgtcgtctcagctcgtctctaaacccttctaaaagagcaccaaaacagactgaggaaattaaacatgtggacatgaaccaaaagagcatattatggagtgcactgaaacagaaagctgaatcccttcagatttcccttgaatacagtggcctaaagaatcctgttattgagatgttagaaggaattgctgttgtcttacaactgactgctctgtgtactgttcattgttctcatcaaaacatgaactgccgtactttcaaggactgtcaacataaatccaagaagaaaccttctgtagtgataacttggatgtcattggatttttacacaaaagtgcttaagagctgtagaagtttgttagaatctgttcagaaactggacctggaggcaaccattgataaggtggtgaaaatttatgatgctttgatttatatgcaagtaaacagttcatttgaagatcatatcctggaagatttatgtggtatgctctcacttccatggatttattcccattctgatgatggctgtttaaagttgaccacatttgccgctaatcttctaacattaagctgtaggatttcagatagctattcaccacaggcacaatcacgatgtgtgtttcttctgactctgtttccaagaagaatattccttgagtggagaacagcagtttacaactgggccctgcagagctcccatgaagtaatccgggctagttgtgttagtggattttttatcttattgcagcagcagaattcttgtaacagagttcccaagattcttatagataaagtcaaagatgattctgacattgtcaagaaagaatttgcttctatacttggtcaacttgtctgtactcttcacggcatgttttatctgacaagttctttaacagaacctttctctgaacacggacatgtggacctcttctgtaggaacttgaaagccacttctcaacatgaatgttcatcttctcaactaaaagcttctgtctgcaagccattccttttcctactgaaaaaaaaaatacctagtccagtaaaacttgctttcatagataatctacatcatctttgtaagcatcttgattttagagaagatgaaacagatgtaaaagcagttcttggaactttattaaatttaatggaagatccagacaaagatgttagagtggcttttagtggaaatatcaagcacatattggaatccttggactctgaagatggatttataaaggagctttttgtcttaagaatgaaggaagcatatacacatgcccaaatatcaagaaataatgagctgaaggataccttgattcttacaacaggggatattggaagggccgcaaaaggagatttggtaccatttgcactcttacacttattgcattgtttgttatccaagtcagcatctgtctctggagcagcatacacagaaattagagctctggttgcagctaaaagtgttaaactgcaaagttttttcagccagtataagaaacccatctgtcagtttttggtagaatcccttcactctagtcagatgacagcacttccgaatactccatgccagaatgctgacgtgcgaaaacaagatgtggctcaccagagagaaatggctttaaatacgttgtctgaaattgccaacgttttcgactttcctgatcttaatcgttttcttactaggacattacaagttctactacctgatcttgctgccaaagcaagccctgcagcttctgctctcattcgaactttaggaaaacaattaaatgtcaatcgtagagagattttaataaacaacttcaaatatattttttctcatttggtctgttcttgttccaaagatgaattagaacgtgcccttcattatctgaagaatgaaacagaaattgaactggggagcctgttgagacaagatttccaaggattgcataatgaattattgctgcgtattggagaacactatcaacaggtttttaatggtttgtcaatacttgcctcatttgcatccagtgatgatccatatcagggcccgagagatatcatatcacctgaactgatggctgattatttacaacccaaattgttgggcattttggctttttttaacatgcagttactgagctctagtgttggcattgaagataagaaaatggccttgaacagtttgatgtctttgatgaagttaatgggacccaaacatgtcagttctgtgagggtgaagatgatgaccacactgagaactggccttcgattcaaggatgattttcctgaattgtgttgcagagcttgggactgctttgttcgctgcctggatcatgcttgtctgggctcccttctcagtcatgtaatagtagctttgttacctcttatacacatccagcctaaagaaactgcagctatcttccactacctcataattgaaaacagggatgctgtgcaagattttcttcatgaaatatattttttacctgatcatccagaattaaaaaagataaaagccgttctccaggaatacagaaaggagacctctgagagcactgatcttcagacaactcttcagctctctatgaaggccattcaacatgaaaatgtcgatgttcgtattcatgctcttacaagcttgaaggaaaccttgtataaaaatcaggaaaaactgataaagtatgcaacagacagtgaaacagtagaacctattatctcacagttggtgacagtgcttttgaaaggttgccaagatgcaaactctcaagctcggttgctctgtggggaatgtttaggggaattgggggcgatagatccaggtcgattagatttctcaacaactgaaactcaaggaaaagattttacatttgtgactggagtagaagattcaagctttgcctatggattattgatggagctaacaagagcttaccttgcgtatgctgataatagccgagctcaagattcagctgcctatgccattcaggagttgctttctatttatgactgtagagagatggagaccaacggcccaggtcaccaattgtggaggagatttcctgagcatgttcgggaaatactagaacctcatctaaataccagatacaagagttctcagaagtcaaccgattggtctggagtaaagaagccaatttacttaagtaaattgggtagtaactttgcagaatggtcagcatcttgggcaggttatcttattacaaaggttcgacatgatcttgccagtaaaattttcacctgctgtagcattatgatgaagcatgatttcaaagtgaccatctatcttcttccacatattctggtgtatgtcttactgggttgtaatcaagaagatcagcaggaggtttatgcagaaattatggcagttctaaagcatgacgatcagcataccataaatacccaagacattgcatctgatctgtgtcaactcagtacacagactgtgttctccatgcttgaccatctcacacagtgggcaaggcacaaatttcaggcactgaaagctgagaaatgtccacacagcaaatcaaacagaaataaggtagactcaatggtatctactgtggattatgaagactatcagagtgtaacccgttttctagacctcataccccaggatactctggcagtagcttcctttcgctccaaagcatacacacgagctgtaatgcactttgaatcatttattacagaaaagaagcaaaatattcaggaacatcttggatttttacagaaattgtatgctgctatgcatgaacctgatggagtggccggagtcagtgcaattagaaaggcagaaccatctctaaaagaacagatccttgaacatgaaagccttggcttgctgagggatgccactgcttgttatgacagggctattcagctagaaccagaccagatcattcattatcatggtgtagtaaagtccatgttaggtcttggtcagctgtctactgttatcactcaggtgaatggagtgcatgctaacaggtccgagtggacagatgaattaaacacgtacagagtggaagcagcttggaaattgtcacagtgggatttggtggaaaactatttggcagcagatggaaaatctacaacatggagtgtcagactgggacagctattattatcagccaaaaaaagagatatcacagctttttatgactcactgaaactagtgagagcagaacaaattgtacctctttcagctgcaagctttgaaagaggctcctaccaacgaggatatgaatatattgtgagattgcacatgttatgtgagttggagcatagcatcaaaccacttttccagcattctccaggtgacagttctcaagaagattctctaaactgggtagctcgactagaaatgacccagaattcctacagagccaaggagcctatcctggctctccggagggctttactaagcctcaacaaaagaccagattacaatgaaatggttggagaatgctggctgcagagtgccagggtagctagaaaggctggtcaccaccagacagcctacaatgctctccttaatgcaggggaatcacgactcgctgaactgtacgtggaaagggcaaagtggctctggtccaagggtgatgttcaccaggcactaattgttcttcaaaaaggtgttgaattatgttttcctgaaaatgaaaccccacctgagggtaagaacatgttaatccatggtcgagctatgctactagtgggccgatttatggaagaaacagctaactttgaaagcaatgcaattatgaaaaaatataaggatgtgaccgcgtgcctgccagaatgggaggatgggcatttttaccttgccaagtactatgacaaattgatgcccatggtcacagacaacaaaatggaaaagcaaggtgatctcatccggtatatagttcttcattttggcagatctctacaatatggaaatcagttcatatatcagtcaatgccacgaatgttaactctatggcttgattatggtacaaaggcatatgaatgggaaaaagctggccgctccgatcgtgtacaaatgaggaatgatttgggtaaaataaacaaggttatcacagagcatacaaactatttagctccatatcaatttttgactgctttttcacaattgatctctcgaatttgtcattctcacgatgaagtttttgttgtcttgatggaaataatagccaaagtatttctagcctatcctcaacaagcaatgtggatgatgacagctgtgtcaaagtcatcttatcccatgcgtgtgaacagatgcaaggaaatcctcaataaagctattcatatgaaaaaatccttagagaagtttgttggagatgcaactcgcctaacagataagcttctagaattgtgcaataaaccggttgatggaagtagttccacattaagcatgagcactcattttaaaatgcttaaaaagctggtagaagaagcaacatttagtgaaatcctcattcctctacaatcagtcatgatacctacacttccatcaattctgggtacccatgctaaccatgctagccatgaaccatttcctggacattgggcctatattgcagggtttgatgatatggtggaaattcttgcttctcttcagaaaccaaagaagatttctttaaaaggctcagatggaaagttctacatcatgatgtgtaagccaaaagatgacctgagaaaggattgtagactaatggaattcaattccttgattaataagtgcttaagaaaagatgcagagtctcgtagaagagaacttcatattcgaacatatgcagttattccactaaatgatgaatgtgggattattgaatgggtgaacaacactgctggtttgagacctattctgaccaaactatataaagaaaagggagtgtatatgacaggaaaagaacttcgccagtgtatgctaccaaagtcagcagctttatctgaaaaactcaaagtattccgagaatttctcctgcccaggcatcctcctatttttcatgagtggtttctgagaacattccctgatcctacatcatggtacagtagtagatcagcttactgccgttccactgcagtaatgtcaatggttggttatattctggggcttggagaccgtcatggtgaaaatattctctttgattctttgactggtgaatgcgtacatgtagatttcaattgtcttttcaataagggagaaacctttgaagttccagaaattgtgccatttcgcctgactcataatatggttaatggaatgggtcctatgggaacagagggtctttttcgaagagcatgtgaagttacaatgaggctgatgcgtgatcagcgagagcctttaatgagtgtcttaaagacttttctacatgatcctcttgtggaatggagtaaaccagtgaaagggcattccaaagcgccactgaatgaaactggagaagttgtcaatgaaaaggccaagacccatgttcttgacattgagcagcgactacaaggtgtaatcaagactcgaaatagagtgacaggactgccgttatctattgaaggacatgtgcattaccttatacaggaagctactgatgaaaacttactatgccagatgtatcttggttggactccatatatgtgaaatgaaattatgtaaaagaatatgttaataatctaaaagtaatgcatttggtatgaatctgtggttgtatctgttcaattctaaagtacaacataaatttacgttctcagcaactgttatttctctctgatcattaattatatgtaaaataatatacattcagttattaagaaataaactgctttcttaatacaaaaaaaa

SEQ ID NO: 7 - DNA, 13172 bp, Homo sapiens
gggttcctcgcggcgatcccgactctcctcccgcggctgcagcagctgccggttgcacacggcctcggcggcggcgcggcgagcgcgggcctgtggagcggcggccgggcgcgcggccccggcgggcacccctcagagggcggccgaggaagctccgggaggaggagcaggaccacgaggaggtgggaggcggcggccgcctggggaccagctccgcgcctcggcctctccgccccctccccagcctttctctcgccctcttctcccacactcccggccggcgcctcggctttgtgcgaggagatggtgtagccccctggccgccgaaggaggagccggacacttgtctcccgtctccgagctgctccccacccctggaggagagacccccccctcggctcggcgccttctgcgtctcccggctggtggggaagcctctgcgccgccggcaccatgagtgaacagagtatctgtcaggcaagagctgctgtgatggtttatgatgatgccaataagaagtgggtgccagctggtggctcaactggattcagcagagttcatatctatcaccatacaggcaacaacacattcagagtggtgggcaggaagattcaggaccatcaggtcgtgataaactgtgccattcctaaagggttgaagtacaatcaagctacacagaccttccaccagtggcgagatgctagacaggtgtatggtctcaactttggcagcaaagaggatgccaatgtcttcgcaagtgccatgatgcatgccttagaagtgttaaattcacaggaaacagggccaacattgcctagacaaaactcacaactacctgctcaagttcaaaatggcccatcccaagaagaattggaaattcaaagaagacaactacaagaacagcaacggcaaaaggagctggagcgggaaaggctggagcgagaaagaatggaaagagaaaggttggagagagagaggttagaaagggaaaggctggagagggagcgactggaacaagaacagctggagagagagagacaagaacgggaacggcaggaacgcctggagcggcaggaacgcctggagcggcaggaacgcctggagcggcaggaacgcctggatcgggagaggcaagaaagacaagaacgagagaggctggagagactggaacgggagaggcaagaaagggagcgacaagagcagttagaaagggaacagctggaatgggagagagagcgcagaatatcaagtgctgctgcccctgcctctgttgagactcctctaaactctgtgctgggagactcttctgcttctgagccaggcttgcaggcagcctctcagccggccgagactccatcccaacagggcattgtcttgggaccacttgcacctccacctcctccaccactcccaccagggcctgcacaggcttcagtagccctccctcctcccccagggccccctccacctcctccactcccatccaccgggcctccaccgccccctcctccccctcctctccctaatcaagtaccccctcctcctccaccacctcctgccccacccctccctgcatctggattctttttggcatccatgtcagaagacaatcgccctttaactggacttgcagctgcaattgccggagcaaaacttaggaaagtgtcacggatggaggatacctctttcccaagtggagggaatgctattggtgtgaactccgcctcatctaaaacagatacaggccgtggaaatggaccccttcctttagggggtagtggtttaatggaagaaatgagtgccctgctggccaggaggagaagaattgctgaaaagggatcaacaatagaaacagaacaaaaagaggacaaaggtgaagattcagagcctgtaacttctaaggcctcttcaacaagtacacctgaaccaacaagaaaaccttgggaaagaacaaatacaatgaatggcagcaagtcacctgttatctccagacgggattctccaaggaaaaatcagattgtttttgacaacaggtcctatgattcattacacagaccaaaatccacacccttatcacagcccagtgccaatggagtccagacggaaggacttgactatgacaggctgaagcaggacattttagatgaaatgagaaaagaattaacaaagctaaaagaagagctcattgatgcaatcaggcaggaactgagcaagtcaaatactgcatagaggaacagactaaggagagataggactttaatctggaggaaaaatatcctacaaacaacaactgttcacaacagcaaacccctacatttatgagctgtaagaagaaaatggagacaaacagaaggagggaaaaaccaacctactctgaaagccttcagacattatgactctggtgataagctctttccctctccgtttgctgcttttttctggcctttacaacagaatggaagagaatcatttaagagttcctgtaacagttatgcagaaaatactaaaacccatcaggcaagatcaccacgcattgaaatattttcatatcaagataaagtcgcacattttccacaatacattgctaaaataaagaggagaaaggcttaggaagtttttttgcagagagtgctggtaaagaattgagcaagtttgctattgtattgtaatgtttctctcaggtttgttcttcctatcatgtttgatattccatgaataattgagatcagccctatgtaagttaagatcataatatgtggaacaaatggaattgtaagtgctttcaaagggtaatatttataagaaagtgtccgaaaaatgtttcttcagcttgagaaattttagaatgataggaagtttctcgagttagccttcatgcaattttgtagattaaaacataaaatttgtccagaacttaaagatttagatgccttcctaaattgttacaatgctttaccaaatctatgacttctacataacacaaaccagtggtcaaatgtaaacactatattgtagatttactgtaggttttcaaccttttttagatttatgcatgtggacatttttataatgtaattacaatcaccacaaggttagcttttttaattgcagacagtaatgcatgtcacactaatatgtagtggccttttcaaggcctagtcccagggaaaacattttgtagagtataggggagtgggaggaaggggaggaataattttttatttaaagttgatttctgcactatctttttctcagttacctgcatgaataaataatgagaaatattttgtgactttaattggtaaatatgttacaaaaccaagtacttaatcttttacatcatgtcttcagctatttgtattttaaccagtaatttcaatggtctgaaacatgattctgagcttcacataatatcttaactgtggaactcaaaagtttgatcactgaatttggcagttattattacctaggtacccccgctgttacacaggtgtttagatacgtgttcctgaatgaagctgcttttgaattttgttatgttgaaatgcaagaaataacaatgatggcagcaattaaggtcacagaaatcattaggtaaaggaaaaccaatgaggagttctgcagttttcttttaataagtaaagtgagacttgggtggtgggaagaaggaaggtgggaagaaggaattagacactctgcctgccactctgcgtgtgtgtgctctcgcgcacgtgctgtctatatggaagccactcccttttctttcctttgaaactggtaaggttaaaataggggagaaatcctacatgttggaatgatagctttttggaaaatttaagaaactctccaggctctccatcttgatttatgcttgagttgttatgtgccatatttgctttgaactctgattatcagaagttttactaaaactttgaaataattcactttcatctgctttctagattttgtacatctcagtccataaagcaaagcttgttgatagtgtagttttctaaacgctgcaaatttgcagcctttaccactacaaagaagtttggatgagggattttttttttctttgtcaaaatagttcctgtttctgtagaaatttcatttttagattaaactgtgatggatgagctatcataattcaagtatacatttcttttttctatcagatattcattgtcatgcagtagtagtaaaaacatcaaagatgcagcaagcttattaagtattattttctaaaagaaataggaggcattttcatctttattattgtacttttggttatgcaaacactttgataatataaacagttatgtcccctataaatctggtcagcaacctcttttgattttgttgggtaagttaaatagtctgtagtaggtagagtactgggtacaagtggtccaaactaagataagagactaaaataaaatgctaaatcttaaaagaaactgggtttatgcactaaacgttttgtgccttggtctaatattaacatgatgtatgtgtaaactgacaaaaaaaaaaaaaaaaaaaaaccagtgttgaatcatgctatatttcccatcatcccagattgctaaatgttctttccaagaagtctgaatgaattattatatacatttgctatcatacatgacagttgtgtcattattagagatttcagtaattaaaatgggaaacagaagcctaagttatttaccttatcaaaaccacgttccttggaaccacattattatgatggtttttgtgctcttgtacgttggatgtcttaagctgagtacagtttaggggatcctttctaatgacaggaaggcactgctttcctcaacactgtgatctgacctgtgacaagtctgtactatccactatgtaaatggctcacaagtcaattgcaaacaaactgaatgtacaaatcttagtgctggtgctgaaatctcttcagaatagtcatcatgatttaaaagtttgtttaaaaatttgcaagcatcaagtgtcaatcaaaactgaagatgaaacactaatgaatgttgaattctcatgcttttaggtgtacttcctttttagaattttcagttttctgctatttttaccgtaactatttcgtttaaatttgtttcatttaagtttcctacacgctaacttcgtttgtgcgattgaaataaaattgcagtatatatatgttgcttgtttgtgacacttagataatcttctgaaataatttgttttaaagtaagttatattggatgtgaaaaacaccttttaaagtccaagactttactacttaaaagtttacatgtcacgtcactattctttacagatttcatagaagtcgtgaatactaagtaatgtatacaaaagaaatatgtgatgatgtgtctactttttgtttgaaataactgttgggtgttccctcttcttattttctctctgcccaccttgacacagtaacttcctcttatagtcaagatgatgattaagtgtttaatttttattccattttgttctgcaacacgttcaggtacttaaaactcattcatgcagttagaattatcctttatgtagtttgcatggtaaaggacattgtgtggtaaagggcattattgagtaatgaattttaagtatagcaaaatatgtatagtgtttatacatgatgctgatttcttaaaacctacatataagcagtagtactttttctctattataaagtattaattttgagttccattttataattctgatgtcttcattagaaatacaaaaatacaatccttgtattttttctttgaccagacccaaattttccccttcccccctccattctcctctccacttctcgtggaccgcgtgttcccaatattcattaacatttgcagccattacagagttacagttgtaaaattttcagctgtttttttttttttttttttgctctagcctgtctcatgttcttgcttctcttcatatgtaagtcagtatttttgtctacaaattaaaagtcacttgtcattcaaaaatgagttaagtaacatgataatcttttaaatttacctagctacaacttttatgtctcttgtaaatttatatatactttcagtgccattgtgaagaattggccttttaattctaagtagtattaccctatgaagcacagtgtgcaaaggtatgctacaaggtctctttaattcctgtgtggccattataattttataacaccattaccctttaaattctaccgattataagcagcgtaaaagtaactatataaagcaaacatcgcaaaggaactctgcaggagctcttaattcctttatgtagctatcataaaattcactttcctgaagacatttactctcattcacttccaaactccaaacctttttctggtagcaccacttttgtttttaatagaaagatgagttcatatctgtacatctctccaaagctctaaggaatgagaaaaggatcctagtatattgaaattactgatgtttaatacctctgccttttcactaaaagccatttaatatttttaaagtcaaaacttgacatacaggtatttataaggaatctccatgactctgaaggaatgaaattgatgtaggtagctttggctatgtaaagacatagtagaggacaattacttaaagaagagttttcttttgaggatttgtagatttgactaagcagctgaagtcagtaacccctcaagaaagtccgtttatagaagccaagaactgttggaggtctgtgatgcaggtttttctgttcccaacatcaaaagctgtggattatttggtgtgttcccctttatgttatctctcgataatttttgagacatcaagattttttaaaatatcaatactggaaagatgaaaccttcaaattaaaacctaaaattgattagaaagaaaagtaaaatattaatgcagtaaatttaggatggttacagatactcaccatcaacataaataaatggagttctaggataaattatttgtggaatactaatggtcaagtcacataagagtaaaatcttttggtgaggagacacatttgacaactgctaaagaattaactaaatttgtctttctaaatagttttctttataaagtaacagaaacattgtaaaaggataaatgactgtcataatgacttaggatgttgtaagaatgtctgccacatttattggttatttctgttgaaatctgaaggaatcgatacatctgaaaattgagaaagggaaataggactgtccccgttacagatactctgtgatgcacacaaccttctaaacggaagtgttagtatcatttaaagcacatagtaggccttgagtatttgcagattaacatgcagaaaaaatcaaagatgaagccccaattaagtgtttgaaccaaagaatcacagtcactgagctgcacccccgttctgtgaagcatgttaaatactcataaagagcagagagcagggcccgtagacgcttctggtgtaggacacaggaattctaggcagagggagaaaattaggggccccagttggtggctgagagtaaaaagaatataccatttgagtagtgctgttctttttcctcagtttttaaagacatataattcctagtagttaggacatctaaatagctcggtaaactggtcagaggcgggaggattgcttgaggccagaagttttgagatcagcctgggtaacagggagactcatttctacaaaaaaatttaaaaatttaggccaggcatggtggtgcacacctgtaatcccagctactcaggagactgaagcgggaggatcacctgagcccagggaggacgcggctgcagtgagccgttatcatgccactgtactccagcctgggtgacagagcgagaacctgtctctaaaaaaaaaaaaaaaaaattctaagagaatatagcttttcatagaaattattagaaaagcttacatatttcattagagagcccagtttgttagactacatttattccgtaaaagttctatatacaaatgacaacccatagtttatcatgtaaatctgatttaactgttcccttcaattccaagaaagatttcttcagcagtagatgacaattctaaaagcataaagaaataactaataaaggagatggatgatgttataggttggtttggttgggttttagtaaatagttattcttctaagaaggcttagaaaatcgagaattgaatagttggtactttgaattccataggaaaaagcactcagaagaaaaagtctacattggctagtgtttagattgagagttaattttcccatcaagtccaaaagtttccatccaagtctatagaaactgagagaaaaggttcttggcttacacttaaaatacacattgttgcaaccatataagagagatacattacagaacgcttttaaaaatttggtctcttaagcgcctaacagtccatgctttagtcacatctgtgaaacctcttttctttttttctttttcttttatttttttttttaaagattaaaggcattttaaaaataaatgtttcatggccgggcatggtggctcacgcctgtaatcccagcactttgggaggctgaggtgggcagatcacctgaggtcaggagtttgagaccagcctggccaacatgatgaaaccccatctctactaaaaatacaaaaaaattggctgggcatagtggtgggcacctgtaatcccagctcttcgggaggctgagacagaagagtcgcttgaatccaggaggtggaggttgcagtgagctaagaccgcgccactgtactccagcctgggcgacagagcgagattccatctctaaataaataaatgtttttcaacgtgttttatgtgagaaataccagcttttcattattactaccagttgatctcaggtgtcacttggttggttctgctgaccgaggcactgggcattttaaatatggagtttccctccacccattgatcaagtctgaggtttgtccatccttggtggcaggctagcttaaccatggattcacaaaccccatttgattgtcgtaagtcataaggccaccccagtgccagtggttgggcatcacagtgagtctgaggtgatgaatttgagttagctgtaggctagttccgcaactcagcaatagcccatggatggttggtaaaagacgttgactttgccacttaaatttccaggagaagaatagcttatagtttatctgaggaaagtaattgggaaggcttagatattgagaagaaagccctgttaaaatctaggtagcatttcctttcttctttattactagagggatgggaggttcaggcctgagtcaggactttacaatttggtgtccttcccagaggtactttgggcttgatcattttaagtttcaattgcaaaaaaaaatttttgacggagtgttgctctgtcactcaggttggagtgcagtggtgcgatctcggctcactgcaacttcccccccctgggttcaaagggattttcctgcctcagcctcccaagtagctgggactacaggcgcgtgccaccatgcccgactaatttttgtatttttagtagagatggggtttcaccatgttgcccaggctggtcttgaactcctgagctcaggtgatctgcccgcctcggccttcaattgcagaagtttttgaagggagaatatttgatcctcacataaaatgtccttgtttctgaaagaaaacatggtaaaaattgttattgagtccatgtctttgccaccttgttggacttgatttccctttctctgtgttcctcccgccctcagtctctctcagtctgtccttttttgtgtgtggagttgtgggcaggtcattggactgggactgactttaccagttttcaggctgtggggctagtcagtcattctctctgagccttctacctctaaagttgagttctttttttaaattctttttgttttgtttttattttttccttgccactatacaagcaaggatagataaagctttttattattattgttattattattatttcgagacagtctcgctctgtcatccaggctggagtgcagtggtgtgatttcagctcactgcaacctctgcctcccgggttcaagcgattctcctacctcagcctccttagtagctgggactacaggcatgcgccaccacacccggctaatttttgtatttttagtagagacagggtttcaccgtattggccaggctggtctcgaactcctgacctcaggtgatccacccaccttggcctcccaaagtgttgggattacaggcataagcgaccgtgcccatccccgataaagttgagttctgaatttcctctttcactgtattctcggcagctactggttggtttattctttttttttaatcttttttggtttattcttcttttgatctttgaagagaaggagaaaaaagatctgagtttggctctcccatcttaagtgcagcttttagttgttttatagtcatagacgctattgcactggacagcatgcatcctggatgtaaacaatgcggaaaaatcaatggagtgaccatcttggggtcagtggtgttgcataaagcaccagtggtgtgctgttctgtgtcagtttcctctgcgccacgtgctttcacagtttgaattaccagcatctctgtggtggcttcagtacattctccattgtgcttcaacctggaagcacattctgccgttcagaaagactgattccaatcatgtaatgggaccacacgagatccatgctccaattatatgaatagcagaaggtccatttgactcttgtagttcaagagctgtttctaagtaaacagactttccagagctcgatgaagtgaagaagcccttctttcaattcctgggcagaattcagtggttttcatatcatctgaacctgctgtgctgctgtttattctatcactgtcagccttgaaaggaaaaaaggaataatcttaccctcctgcccttcttattttatatcttccatcttatccatctatatccatgtagtcattccttccgagttccctggttttaatccaaaagactctgtttaacagcaatgtcttggcagaccaggtgccgcttccgtgccatttgagggctctgagtctttgcttcgtcttaggaagataaagataatttggcagaaagtcagagatggaaatagcagtttgggatgataaaagatgggtcctgttttgctgacattcttttactttggttcttggtgcgtgtcctttgggattcatttcttgctagcatgaataggacatgcttttcgttaggtgcttttcttttttggagaacatgaagtgtttctaacaaaactgaatgagctagaaagaattctattttgagacatctgtagttgatgcaaagtatttctgtaatcctcaatgacagtacttacatatttgcatagaattttttttttaatttttgaggaaacctctctggagtctgtatttataggagcatcctgaaagtccctattatgtagctggtgggagcgagagagggacagccacactcgtgctgtgagcagagcacaacttcaggcagagtgaatgccttctgagttctcattggaagctttctgttgctcagcctctggcagatttcagaaccttctacttaagccaggtgtggtggtgcgtgctcctaggcacagcgactcggggggctgaggcagaaggatcacttgagcccaaagttggaggccagcctgggcaacatagcgaggcctgtctccttaaaaaataaataaataaataataaataaataaataaataaaaaccttgtccttgactattgtgctgtctgctgcccctttgtagggatggggttggggtcagaataagcatgtgcatgaatggcggaaagctttggtggtgtttgtttgtttgtttgttttttgagaggtgggggagtcagcagtgaacctttctggttaaagaacaacgtacataatttctattatgagatttagaaggttaaatacttttttttttcaggcctaccaagttgatagaccaaaagtatatagtagaacagcacagtagaaaaaatttaaaagtgaatttcttatggtccaaaaggatggatagtcacagtccataacctttcataatatatgctggaattggaatctcttgtcatcttgctttgctctgaattttagaactagaagtgtgcatgtatgtcaaaagattatgcagagctattttctttgctaacaatgtaaacatttgcaccccatgaatgggactttataatctggaagtgagcctaaggttgcgtatactgaagtcatgttttaaaagttaaggttgacttaaacatatacaaggctgtattttaattgtaactagaaatcatttactatgcatacagaacctcatgtatcttatcatggaatttgtgaattaatgggccttgccgaattcaagggtaagggaaactggtaacaacttgttttaaatcaacatactataagctcctgcttgcttgactcaagttgtttgaaaatctgaattaaacaggatctcattgtcaggaaacatcttctaagcttgacatctacgtttaagaagggaacgtggaagagaaggtgagacatgaaactaaaacagctgggagggtaggatcagactgcacctgatttttggaccaaagtttcatataggaataaataaaaaggaggaccacttgtgagccaacctaggaaggacttgccagaaagtagcagctcctgctgcaaaatacagtgccttcaaaatgattctctgtgtgaattgcatgcaatttcatgtaaccataaagtgtaacctgtatgtgcatgacatgtgtctagaatgtgtaaagttaggattcagcaggaaggggcctggccctgtcactgtggtggatcagtggacctgctgaagtcactggactcatgtgacttaggtttgcagcatcagacccctgtgtttgcattaagtggccacatcgttgaaatcggatcaatctctccctcagctttctttcctactttgcagctttgctggttttaactgcttcattcttctgcttcttggtatccttttttcttttgaaataaaaacatgaaatacttaattc

SEQ ID NO: 8 - DNA, 6780 bp, Homo sapiens
gattgccacccaggacgatgagcggctgagatggagacgtctgcctcagccactgcctccgagaagcaagaagccaaaagtgggatcctggaggccgctggcttccccgacccgggtaaaaaggcctctcctttggtggtggctgcagcggcagcagcagcggtagctgcccaaggagtgccgcagcatctcttgccaccattccatgcgcccctaccgattgacatgcgacaccaggaaggaaggtaccattacgagcctcattctgtccacggtgtgcacgggccccctgccctcagcggcagccctgtcatctctgacatctccttgatccggctttccccgcacccggctggccctggggagtcccccttcaacgccccccacccgtacgtgaacccccacatggagcactacctccgttctgtgcacagcagccccacgctctccatgatctctgcagccaggggcctcagccccgctgatgtggcccaggagcaccttaaggagaggggactgtttggccttcctgctccaggcaccaccccctcagactattaccaccagatgaccctcgtggcaggccaccccgcgccctacggggacctgctgatgcagagcgggggcgctgccagcgcaccccatctccacgactacctcaaccccgtggacgtgtcccgtttctccagcccgcgggtgacgccccgcctgagccgcaagcgggcgctgtccatctccccactctcagacgccagcctggacctgcagcggatgatccgcacctcacccaactcgctagtggcctacatcaacaactcccgaagcagctcggcggccagcggttcctacgggcatctgtcagcgggtgccctcagcccagccttcaccttcccccaccccatcaaccccgtggcctaccagcagattctgagccagcagaggggtctggggtcagcctttggacacacaccacccctgatccagccctcacccaccttcctggcccagcagcccatggccctcacctccatcaatgccacgcccacccagctcagcagcagcagcaactgtctgagtgacaccaaccagaacaagcagagcagtgagtcggccgtcagcagcaccgtcaaccctgtcgccattcacaagcgcagcaaggtcaagaccgagcctgagggcctgcggccggcctcccctctggcgctgacgcagggccaggtgtctggacacggctcatgtgggtgtgcccttcccctctcccaggagcagctggctgacctcaaggaagatctggacagggatgactgtaagcaggaggctgaggtggtcatctatgagaccaactgccactgggaagactgcaccaaggagtacgacacccaggagcagctggtgcatcacatcaacaacgagcacatccacggggagaagaaggagtttgtgtgccgctggcaggcctgcacgcgggagcagaagcccttcaaggcgcagtacatgctggtggtgcacatgcggcgacacacgggcgagaagccccacaagtgcacgttcgagggctgctcgaaggcctactcccgcctggagaacctgaagacacacctgcggtcccacaccggggagaagccatatgtgtgtgagcacgagggctgcaacaaagccttctccaacgcctcggaccgcgccaagcaccagaatcgcacccactccaacgagaaaccctacatctgcaagatcccaggctgcaccaagagatacacagaccccagctctctccggaagcatgtgaaaacggtccacggcccagatgcccacgtcaccaagaagcagcgcaatgacgtgcacctccgcacaccgctgctcaaagagaatggggacagtgaggccggcacggagcctggcggcccagagagcaccgaggccagcagcaccagccaggccgtggaggactgcctgcacgtcagagccatcaagaccgagagctccgggctgtgtcagtccagccccggggcccagtcgtcctgcagcagcgagccctctcctctgggcagtgcccccaacaatgacagtggcgtggagatgccggggacggggcccgggagcctgggagacctgacggcactggatgacacacccccaggggccgacacctcagccctggctgccccctccgctggtggcctccagctgcgcaaacacatgaccaccatgcaccggttcgagcagctcaagaaggagaagctcaagtcactcaaggattcctgctcatgggccgggccgactccacacacgcggaacaccaagctgcctcccctcccgggaagtggctccatcctggaaaacttcagtggcagtgggggcggcgggcccgcggggctgctgccgaacccgcggctgtcggagctgtccgcgagcgaggtgaccatgctgagccagctgcaggagcgccgcgacagctccaccagcacggtcagctcggcctacaccgtgagccgccgctcctccggcatctccccctacttctccagccgccgctccagcgaggcctcgcccctgggcgccggccgcccgcacaacgcgagctccgctgactcctacgaccccatctccacggacgcgtcgcggcgctcgagcgaggccagccagtgcagcggcggctccgggctgctcaacctcacgccggcgcagcagtacagcctgcgggccaagtacgcggcagccactggcggccccccgcccactccgctgccgggcctggagcgcatgagcctgcggaccaggctggcgctgctggacgcgcccgagcgcacgctgcccgccggctgcccacgcccactggggccgcggcgtggcagcgacgggccgacctatggccacggccacgcgggggctgcgcccgccttcccccacgaggctccaggcggcggagccaggcgggccagcgaccctgtgcggcggcccgatgccctgtccctgccgcgggtgcagcgcttccacagcacccacaacgtgaaccccggcccgctgccgccctgtgccgacaggcgaggcctccgcctgcagagccacccgagcaccgacggcggcctggcccgcggcgcctactcgccccggccgcctagcatcagcgagaacgtggcgatggaggccgtggcggcaggagtggacggcgcggggcccgaggccgacctggggctgccggaggacgacctggtgcttccagacgacgtggtgcagtacatcaaggcgcacgccagtggcgctctggacgagggcaccgggcaggtgtatcccacggaaagcactggcttctctgacaaccccagactacccagcccggggctgcacggccagcgcaggatggtggctgcggactccaacgtgggcccctccgcccctatgctgggaggatgccagttaggctttggggcgccctccagcctgaacaaaaataacatgcctgtgcagtggaatgaggtgagctccggcaccgtagacgccctggccagccaggtgaagcctccaccctttcctcagggcaacctggcggtggtgcagcagaagcctgcctttggccagtacccgggctacagtccgcaaggcctacaggctagccctgggggcctggacagcacgcagccacacctgcagccccgcagcggagccccctcccagggcatccccagggtaaactacatgcagcagctgcgacagccagtggcaggcagccagtgtcctggcatgactaccactatgagcccccatgcctgctatggccaagtccacccccagctgagccccagcaccatcagtggggccctcaaccagttcccccaatcctgcagcaacatgccagccaagccagggcatctggggcaccctcagcagacagaagtggcacctgaccccaccacgatgggcaatcgccacagggaacttggggtccccgattcagccctggctggagtgccaccacctcacccagtccagagctacccacagcagagccatcacctggcagcctccatgagccaggagggctaccaccaggtccccagccttctgcctgcccgccagcctggcttcatggagccccaaacaggcccgatgggggtggctacagcaggctttggcctagtgcagccccggcctcccctcgagcccagccccactggccgccaccgtggggtacgtgctgtgcagcagcagctggcctacgccagggccacaggccatgccatggctgccatgccgtccagtcaggaaacagcagaggctgtgcccaagggagcgatgggcaacatggggtcggtgcctccccagccgcctccgcaggacgcaggtggggccccggaccacagcatgctctactactacggccagatccacatgtacgaacaggatggaggcctggagaacctcgggagctgccaggtcatgcggtcccagccaccacagccacaggcctgtcaggacagcatccagccccagcccttgccctcaccaggggtcaaccaggtgtccagcactgtggactcccagctcctggaggccccccagattgacttcgatgccatcatggatgatggcgatcactcgagtttgttctcgggtgctctgagccccagcctcctccacagcctctcccagaactcctcccgcctcaccaccccccgaaactccttgaccctgccctccatccccgcaggcatcagcaacatggctgtcggggacatgagctccatgctcaccagcctcgccgaggagagcaagttcctgaacatgatgacctagaggcccgagcgcctggtgctgagtgcacccggaggggtcatcgctgcccagagcctggggattccagctgtcttgtctttttccaaaaaagtgttaaataggcttgaggggttgttgcgcaatggccgcttcagatgacagatgttgtaagagaaggtttatgggcatcctctctggtcttttggattattcctcagaacaatgaaaaaagtctccataggacaggaaggaatgcaaaactcatttacacagtgctttccagcctttggtgcttacaggaccgcgctgttccggcttcttcacggctgacattcggctaacgagggattactttggccaaaacctttcaaaggatatgcagaaagatggtagggagcatttgggtttgaatctgaatgctatactggatactctgctccggaaagatgagctttttattctactacttggaaggaaaaggaattcctggtccacctgaattcctctatgaagcctaactcttgaggtctctaacataccttgtcatagaggaaaagcacagattatacctggatgattcaggagcacattctgattccaggtttggtagagctggctcttctactccgtaaagccgagtctgggactggcagcccatccaagtgtatatgaatgaataaagcatccaagtatatatgaatgaataaagtatgtaagtatcaccagaaaaaggaaagaaaaaatgtactccttggggcaagcccagaagctgccctggcctctccagaccgtgtttacagtgtttgcatgtagaatgtagcccttcctgaaaagaagacttgtttctaaatacctcggggctgctggagccgctgtgggttagggatggactgaggcctcgaggagtgagggtgcacccggggcccagcctcaggctgccctagggatctctcagtaggaagaggaagttgcgtgtttacccaatcctgtttctccaatgcaacgtccacccactttaccaccaaaaactccagggcctgacggcagcccggtcccccagcactcaccagcagcccagtgttctccaccaagccacagtgtgcatgcctggtatcctccggattcccttccttctgcccgctgagtcactgggcagagaatgatgacatgtgtaggtggtgtggttgggggtggaaaggggaaggggttgatcctcaggactctgagggagcatcgttgaattttcctgttcagtgtgaccaagacccacctggaaatggaatttggaactggcttcaggagacatcattcctgaacacactgtagggtgaattggtgcatcttccccaccatacacacacacacacacacacacacacacacacacacacacacaccccaaaccttttcatggggaatgtgtggcaaccttgccaaacagcaccactcagagtgtgactctgactgtgaccttggccttaatgaggaacttcttaggagagtttgaggacaaggccaacatcgtcatctgggctcgctgcgtcccagcacatcaaactctgtccagagacaaggccaactgcaaatgaaagccagggaacattgctaagggtctgtggctctgtggtggtgttcatcgccttcctgagataggatttcccttgccagtcccaacctgtatatattctgtacagaagacatccctgaatatactgtaggtgagtcgtccagccaaatttatatctccaaaacatttttagctttttctacatgctatgaattgagatgacatgctcaacttgtaaataagtctttttgtacattaaaaaagtaattttttcataatttatcttgtctatctgcttcccccttgacagtagttaatgagaacctgggcagtaaatttggtgcattcgagcagaaattaggctgtattttttcttaacagtgtcaaaattgactatcccgcctttgccaagaaatgtttaatgctgaggcaaaaaaaaaaaa

SEQ ID NO: 9 - DNA, 609 bp, Homo sapiens
gcagttgtctttggtagtttttttgcactaacttcaggaaccagctcatgatctcaggatgtatggaaaaataatctttgtattactattgtcagatggagccaaccctgaaaattctgggagaagaggacagaaggcagagggaagagcaagagcaaaaattctgaaacaggagaaattgtgagcatatcagcattaagtaccactgaggtggcaatgcacacttcaacctcttcttcagtcacaaagagttacatctcatcacagacaaatggagaaacgggacaacttgtccatcgtttcactgtaccagctcctgtagtgataatactcattattttgtgtgtgatggctggtattattggaacgatcctcttaatttcttacactattcgccgactgataaaggcatgaggatgtggcctgcatgctgcctgatcttgcctagaaccggctgcacctgctgttctcttgtttatgcaaactggctgcacctgctattcctttgcttatgcccctacccctggctatcctaattccctgttctcctgcctcactattactgtattctctacttctaaataaaaataaaacaaaatacaaaccgtt

SEQ ID NO: 10 - DNA, 6855 bp, Homo sapiens
gtgacgggagcatcggcgctggctgcccgggccgcgagcgcagcagagctgtcagcgggcggacgggcagcgggtgacggagcggcgagacgagcgcacagcagtcgcggcccgggagccggagctgccgccgcaccccgggaaggctgccttgccgccggcccgccgaccgcggccggacgaagatgctgttccgcgcccgggggccggtacggggcaggggctgggggcggccggcggaggctccccgccgcgggcgctcgccgccctggagccccgcctggatttgctgctgggcgctcgccggctgccaggcggcctgggctggggacctgccctcctcctccagccgcccgcttcctccttgccaggagaaagattatcactttgaatatacggaatgtgatagcagtggctccaggtggagagttgccattccaaattctgcagtggactgctctggcctgcctgacccagtgagaggcaaagaatgcactttctcctgtgcttctggagagtatctagaaatgaagaaccaggtatgcagtaagtgtggtgaaggcacctattccttgggcagtggcatcaaatttgatgaatgggatgaattgccggcaggattttctaacatcgcaacattcatggacactgtggtgggcccttctgacagcaggccagacggctgtaacaactcttcttggatccctcgtggaaactacatagaatctaatcgtgatgactgcacggtgtctttgatctatgctgtgcaccttaagaagtcaggctatgtcttctttgagtaccagtatgtcgacaacaacatcttctttgagttctttattcaaaatgatcagtgccaggagatggacaccaccactgacaagtgggtaaaacttacagacaatggagaatggggctctcattctgtaatgctgaaatcaggcacaaacatactctactggagaactacaggcatccttatgggttctaaggcggtcaagcctgtgctggtaaaaaatatcacaattgaaggggtggcgtacacatcagaatgttttccttgcaagccaggcacattcagcaacaaaccaggttcattcaactgccaggtgtgtcccagaaacacctattctgagaaaggagccaaagaatgtataaggtgtaaagacgactctcaattttcagaggaaggatccagtgagtgtacagagcgccctccctgtaccacaaaagactatttccagatccatactccatgtgatgaagaaggaaagacacagataatgtacaagtggatagagcccaaaatctgccgggaggatctcacagatgctattagattgcccccttctggagagaagaaggattgtccgccttgcaaccctggattttataacaatggatcatcttcttgccatccctgtcctcctggaacattttcagatggaaccaaagaatgtagaccatgtccagcaggaacggagcctgcacttggctttgaatataaatggtggaatgtccttcctggcaacatgaaaacttcctgcttcaatgttgggaattcaaagtgcgatggaatgaatggttgggaggtggctggagatcatatccagagtggggctggaggttctgacaatgattacctgatcttaaacttgcatatcccaggatttaaaccaccaacatctatgactggagccacgggttctgaactaggaagaataacatttgtctttgagaccctctgttcagctgactgtgttttgtacttcatggtggatattaatagaaaaagtacaaatgtggtagaatcgtggggtggaaccaaagaaaaacaagcttacacccatatcatcttcaagaatgcaacttttacatttacatgggcattccagagaactaatcagggtcaagataatagacggttcatcaatgacatggtgaagatttattctatcacagccactaatgcagttgatggggtggcgtcctcatgccgtgcctgtgccctcggttctgaacagtcgggttcatcgtgtgtcccctgccctccaggccactacattgagaaagaaaccaaccagtgcaaggaatgtccacctgacacctacctgtccatacatcaggtctatggcaaagaggcttgtattccatgcgggcctgggagtaaaaacaatcaggaccattcggtttgctatagtgactgctttttctaccatgaaaaagaaaatcagagtttgcactatgactttagcaacctcagcagtgtgggctcattaatgaatggccccagcttcacctccaaaggaacaaaatacttccatttcttcaatatcagtttatgtgggcatgaggggaagaagatggctctctgtaccaacaatataacagactttacagtaaaagaaatagtggcagggtcagatgattacacaaatttggtaggggcatttgtatgccagtcaacaattattccttctgaaagtaagggtttccgagcagccttatcatcacaatccatcattctggcagatacattcataggagtcacagttgaaaccacattgaaaaatattaatataaaagaagatatgttcccagttccaacaagccaaataccagatgtgcatttcttttataagtcttctacagcaacaacatcttgtattaatggccgatcaactgctgtgaaaatgaggtgtaatcctactaaatctggagcaggagtgatttcagtccccagcaagtgcccagcaggtacctgtgatgggtgtacgttctatttcctgtgggagagtgctgaagcttgccctctgtgtacggagcatgacttccatgagattgagggagcctgcaagagaggatttcaggaaaccttgtatgtgtggaatgaacctaaatggtgcattaaaggaatttctttgcctgagaaaaagttggcaacctgtgaaacggttgacttttggctgaaggtgggagccggtgtgggagcttttactgccgttttgctggtggctctgacctgctacttctggaaaaagaatcaaaaactggaatacaaatattccaagttagtaatgacgactaactcaaaagagtgtgaactcccggctgcagacagttgtgctatcatggaaggagaagataatgaagaggaagttgtatattccaataaacagtcactactaggaaaactcaaatctttggcaaccaaggaaaaagaagaccattttgaatctgttcaactgaaaacctcaagatccccaaatatatgaagagacagtgctgtagccttgagactaatgaacaaagaaacctgctctagttttacaggaccatattttagggtctgtcctcatacctgtcacattggtgatctcacagaggagggccatgccgctgaaaagggaaggagattgaaacatttgattgccttatcacatggtcaagtaccttgccaaataaaggaaagcaaatgatttgggtctcaactgaagatgaagctcaactcaggaagagatttatctgtatatacacataactgaaaaccaagtttaagcccaccaatgcactgctgatgcatgccatataattaatgggtaacttttattctttatgatgtctacataacaagtgtgatttggaaggcacatgtgagcatatgcattatgatccaatttatgttttttctttgtttatattttggggaaaattaaaatttttttaaggtatatttttcccattatttattttcctgaccttaaaacagcttttctactaaaaaatggtgagcaatgaagacaataaatttttcatttttccataggttatcttctcttgatttaaatttcaggaagagttagcatgtgcttgggttatctagatttataattgcctttgaaattccatcctcgttggagctggtaagaagggcttgactgaaagtttgaaggaatctaaaaaacaaaaaagtaagaaaggtaacgagaagccctaattctccattaatgcaaactagctgctagtatcatagaagtcaaatgacttaaaacagtttatgtagtgctagaagtataattaaagtaaataggaaagcttgtcaatcaaatcactggcaaaatcatgaagaagagagtgagaaggtttgtctataagtacagatgactgtatgaaatactggggtaatttcatggtctccagaaaatgtcagtgggacttttgttctttgtcaagcaccagaggttatatggttatttttctgctgcaagactttgaggatgttgactttctcagaaactttttaaaaaaataatccaataaggcaggaattcagttttgaaaaattacatataattgtattcataataagaatgtggttatttcataagcagttatgaaagaattattgttcttattcaaaagtgatccagataattgtgatattttctatggtgggctactggtattagcacgacttggatattatttgttgaaggaagtatgaatgaagttggatttgaccaatttcgtgtaaaccttaattgatttaaaactgggaaagaggggggtttcctggccattgctgatctaaggtgctcttatttgtttccaataaacagtaatctttatagaccttaatgcagatttaaaaaaatagttgtgattggctgagagaggcagggcatatatgtagggaaatgatttgccccaagcattccaatgaagtatgacttgtaacttttgtgtctgaaggtggtgtctttatttttgtggaaaatgggagaaaaatgaataattgtgtttatttggctgattggtaatacactagaccattctgttattattgaatgaatgttttgtgtatatctctgctgttgcacatatgagtataggtgaggttgtcattgtttgctctgggattcagggagggagtcactttgcataaacctttttttgcatttaatttcttgaatgttcttataaagaagacattatgttggcattcttcatttttatcctgccaacagagtgcttatgagcatgtctgcattttgatcaaaatttaaacagaagagtgaaaatacatttgaaatgaaccctttcagaggaaccctggcaaagctgtatagactggacagagtgagaaaacttccacagccacctgtcacctttctcctcatcttccactgtgttcaatatgtatgttccaagccatagagataattgggattttctcccaggtagcttctttcttctcctgtcactggactaaaatctctgacatgtcaaaaatgccttaaattttaatgaactctccgaaaatgtagttgatattggagaatttattttatttctaattttagatattaaatatattttgtcagcacagtcccatctttgggaaggaggtgattttttcccttggattccagtggtttgtcattttatttcaagcactgaagaagtatgacagaaagaatattatggggaaaatatttagaccaatcctggctataaaatttcctttagttttatgcctggcctttgcaaagctcagtgaaatgttgaaaggaataaattaatcatgtttctgtgacttttgattgacacttgttccttttcccccctaagtggtagaagaagttatttgttatttttctaaaaggcacaattttgaagccttaactacttcattaagtcaactgttgcctataacatctcttagcactcgtcaaaacgtatttaaatcaattttccaatggatgagaacatgtcttctgtggataaattatattatgtcatttaacaacattgagcattttgatatgtgttcactgaattaaaaaacctgaatttcattattgttgacttttcccctctttagttactagtaatcacatcctttctaggattaaaaatatttcatagtatttttgtgtagatgtctgtccttattttcttcccaaagaaaaaaggttgtttaaattgattatgtggaagaattacttgggtccagtctttagcatctggggtctccaggtccccaggtgggtcatgattgactgcttcttcaagacccatcttgccaactctcacttgatgtctgtcaatagaactacttcctgtggcacatggttatttctaatgggaggctaatgtgtacataatttctctcttcctcatagaaataaatttctctgggggttgctgtgagaggatgacttcattagccatgtttaaagtgagtgtactgctcacgtttatctttgtacactaagagtatgtagagttgatcttcagagaaactaaacctccctcatatctatttatagtaatcatgaatatgattgcagttgacaggcccaactcctaaactgagtttgcccaaagaaaatgtccttagaggagtaaacttttagaaatctcaacacccgactcattcgttggaagctaaaatggaattcatcttcatactaactggctacagattattctcttgctggattttacttttattttaacatttttacatgagttccttttagaatcataaatgaaagaagtaaaactttaagatgggaatgaataattgaaaagagaattatatttactattataattgatattattcgctattatgattacacttgtctagatcagagcccagcaaacattttttttgtaaagggtcagatagtacatagttttggctttgcagggcatgtgggctctattgcatttactcaactctgccattgtagtatgaaagcaaccacatacaaaatgtaaatggatgggcgtggctgcattccaataaaactttatttatggacactgaaaaaaaaaaaaaaaaaa

SEQ ID NO: 11 - DNA, 3227 bp, Homo sapiens
cagcagacggcagacggtgcccggcgcccacgggaagctgaagatacagcggtaaacaaacctccatgtctcaagctgaccacacttgtatctggacttgccagctgattagctctgttcccaccaggctcgttcaaagacccacagcttgagggggcagagggctgcccctgatggggcctggcaatgactgagcaggcccagccccagaggacaaggaagagaaggcatattgaggagggcaagaagtgacgcccggtgtagaatgactgccctgggagggtggttccttgggccctggcagggttgctgacccttaccctgcaaaacacaaagagcaggactccagactcttcttgtgaatggtcccctgccctgcagctccaccatgaggcttctcgtggccccactcttgctagcttgggtggctggtgccactgccgctgtgcccgtggtaccctggcatgttccctgcccccctcagtgtgcctgccagatccggccctggtatacgccccgctcgtcctaccgcgaggctaccactgtggactgcaatgacctattcctgacggcagtccccccggcactccccgcaggcacacagaccctgctcctgcagagcaacagcattgtccgtgtggaccagagtgagctgggctacctggccaatctcacagagctggacctgtcccagaacagcttttcggatgcccgagactgtgatttccatgccctgccccagctgctgagcctgcacctagaggagaaccagctgacccggctggaggaccacagctttgcagggctggccagcctacaggaactctatctcaaccacaaccagctctaccgcatcgcccccagggccttttctggcctcagcaacttgctgcggctgcacctcaactccaacctcctgagggccattgacagccgctggtttgaaatgctgcccaacttggagatactcatgattggcggcaacaaggtagatgccatcctggacatgaacttccggcccctggccaacctgcgtagcctggtgctagcaggcatgaacctgcgggagatctccgactatgccctggaggggctgcaaagcctggagagcctctccttctatgacaaccagctggcccgggtgcccaggcgggcactggaacaggtgcccgggctcaagttcctagacctcaacaagaacccgctccagcgggtagggccgggggactttgccaacatgctgcaccttaaggagctgggactgaacaacatggaggagctggtctccatcgacaagtttgccctggtgaacctccccgagctgaccaagctggacatcaccaataacccacggctgtccttcatccacccccgcgccttccaccacctgccccagatggagaccctcatgctcaacaacaacgctctcagtgccttgcaccagcagacggtggagtccctgcccaacctgcaggaggtaggtctccacggcaaccccatccgctgtgactgtgtcatccgctgggccaatgccacgggcacccgtgtccgcttcatcgagccgcaatccaccctgtgtgcggagcctccggacctccagcgcctcccggtccgtgaggtgcccttccgggagatgacggaccactgtttgcccctcatctccccacgaagcttccccccaagcctccaggtagccagtggagagagcatggtgctgcattgccgggcactggccgaacccgaacccgagatctactgggtcactccagctgggcttcgactgacacctgcccatgcaggcaggaggtaccgggtgtaccccgaggggaccctggagctgcggagggtgacagcagaagaggcagggctatacacctgtgtggcccagaacctggtgggggctgacactaagacggttagtgtggttgtgggccgtgctctcctccagccaggcagggacgaaggacaggggctggagctccgggtgcaggagacccacccctatcacatcctgctatcttgggtcaccccacccaacacagtgtccaccaacctcacctggtccagtgcctcctccctccggggccagggggccacagctctggcccgcctgcctcggggaacccacagctacaacattacccgcctccttcaggccacggagtactgggcctgcctgcaagtggcctttgctgatgcccacacccagttggcttgtgtatgggccaggaccaaagaggccacttcttgccacagagccttaggggaccgtcctgggctcattgccatcctggctctcgctgtccttctcctggcagctgggctagcggcccaccttggcacaggccaacccaggaagggtgtgggtgggaggcggcctctccctccagcctgggctttctggggctggagtgccccttctgtccgggttgtgtctgctcccctcgtcctgccctggaatccagggaggaagctgcccagatcctcagaaggggagacactgttgccaccattgtctcaaaattcttgaagctcagcctgttctcagcagtagagaaatcactaggactactttttaccaaaagagaagcagtctgggccagatgccctgccaggaaagggacatggacccacgtgcttgaggcctggcagctgggccaagacagatggggctttgtggccctgggggtgcttctgcagcctcgaaaaagttgcccttacctcctagggtcacctctgctgccattctgaggaacatctccaaggaacaggagggactttggctagagcctcctgcctccccatcttctctctgcccagaggctcctgggcctggcttggctgtcccctacctgtgtccccgggctgcaccccttcctcttctctttctctgtacagtctcagttgcttgctcttgtgcctcctgggcaagggctgaaggaggccactccatctcacctcggggggctgccctcaatgtgggagtgaccccagccagatctgaaggacatttgggagagggatgcccaggaacgcctcatctcagcagcctgggctcggcattccgaagctgactttctataggcaattttgtacctttgtggagaaatgtgtcacctcccccaacccgattcactcttttctcctgttttgtaaaaaataaaaataaataataacaataatacgggggaaaggaacgaaaggaaaaaaaaaaaaaaaaaaaaaaa

SEQ ID NO: 12 - DNA, 4329 bp, Homo sapiens
tgagctgccgatcaccggatgccccagattcctgggacccaatcccggatttcagaacctcaggaccttgcaagtccgagctaggatttctccctggactttagattcctggaacgggacgtcaggccgtattccggatccctagatcccgtgggagattctccgattccgaacggattccagatcccaagattcctgatctgccggcccaggctcctgccccgcccccggttcccagtgcgcggcgccccgcgcctgagcgcccccgcatggcggggccgtgtccccggtccggggcggagcgcgccggcagctgctggcaggacccgctggccgtggcgctgagccggggccggcagctcgcggcgcccccgggccggggctgcgcgcggagccggccgctcagcgtggtctacgtgctgacccgggagccgcagcccgggctcgagcctcgggagggaaccgaggcggagccgctgcccctgcgctgcctgcgcgaggcttgcgcgcaggtcccccggccgcggccgcccccgcagctgcgcagcctgcccttcgggacgctggagctaggcgacaccgcggctctggatgccttctacaacgcggatgtggtggtgctggaggtgagcagctcgctggtacagccctccctgttctaccaccttggtgtgcgtgagagcttcagcatgaccaacaatgtgctcctctgctcccaggccgacctccctgacctgcaggccctgcgggattgcgttggcagctacacactgatcccctatgtggtgacggccactggtcgggtgctgtgtggtgatgcaggccttctgcggggcctggctgatgggctggtacaggctggagtggggaccgaggccctgctcactcccctggtgggccggcttgcccgcctgctggaggccacacccacagactcttgtggctatttccgggagaccattcggcgggacatccggcaggcgcgggagcggttcagtgggccacagctgcggcaggagctggctcgcctgcagcggagactggacagcgtggagctgctgagccccgacatcatcatgaacttgctgctctcctaccgcgatgtgcaggactactcggccatcattgagctggtggagacgctgcaggccttgcccacctgtgatgtggccgagcagcataatgtctgcttccactacacttttgccctcaaccggaggaacaggcctggggaccgggcgaaggccctgtctgtgctgctgccgctggtacagcttgagggctctgtggcgcccgatctgtactgcatgtgtggccgtatctacaaggacatgttcttcagctcgggtttccaggatgctgggcaccgggagcaggcctatcactggtatcgcaaggcttttgacgtagagcccagccttcactcaggcatcaatgcagctgtgctcctcattgctgccgggcagcactttgaggattccaaagagctccggctaataggcatgaagctgggctgcctgctggcccgcaaaggctgcgtggagaagatgcagtattactgggatgtgggtttctacctgggagcccagatcctcgccaatgaccccacccaggtggtgctggctgcagagcagctgtataagctcaatgcccccatatggtacctggtgtccgtgatggagaccttcctgctctaccagcacttcaggcccacgccagagccccctggagggccaccacgccgtgcccacttctggctccacttcttgctacagtcctgccaaccattcaagacagcctgtgcccagggcgaccagtgcttggtgctggtcctggagatgaacaaggtgctgctgcctgcaaagctcgaggttcggggtactgacccagtaagcacagtgaccctgagcctgctggagcctgagacccaggacattccctccagctggaccttcccagtcgcctccatatgcggagtcagcgcctcaaagcgcgacgagcgctgctgcttcctctatgcactccccccggctcaggacgtccagctgtgcttccccagcgtagggcactgccagtggttctgcggcctgatccaggcctgggtgacgaacccggattccacggcgcccgcggaggaggcggagggcgcgggggagatgttggagtttgattatgagtacacggagacgggcgagcggctggtgctgggcaagggcacgtatggggtggtgtacgcgggccgcgatcgccacacgagggtgcgcatcgccatcaaggagatcccggagcgggacagcaggttctctcagcccctgcatgaagagatcgctcttcacagacgcctgcgccacaagaacatagtgcgctatctgggctcagctagccagggcggctaccttaagatcttcatggaggaagtgcctggaggcagcctgtcctccttgctgcggtcggtgtggggacccctgaaggacaacgagagcaccatcagtttctacacccgccagatcctgcagggacttggctacttgcacgacaaccacatcgtgcacagggacataaaaggggacaatgtgctgatcaacaccttcagtgggctgctcaagatttctgacttcggcacctccaagcggctggcaggcatcacaccttgcactgagaccttcacaggaactctgcagtatatggccccagaaatcattgaccagggcccacgcgggtatgggaaagcagctgacatctggtcactgggctgcactgtcattgagatggccacaggtcgcccccccttccacgagctcgggagcccacaggctgccatgtttcaggtgggtatgtacaaggtccatccgccaatgcccagctctctgtcggccgaggcccaagcctttctcctccgaacttttgagccagacccccgcctccgagccagcgcccagacactgctgggggaccccttcctgcagcctgggaaaaggagccgcagccccagctccccacgacatgctccacggccctcagatgccccttctgccagtcccactccttcagccaactcaaccacccagtctcagacattcccgtgccctcaggcaccctctcagcacccacccagccccccgaagcgctgcctcagttatgggggcaccagccagctccgggtgcccgaggagcctgcggccgaggagcctgcgtctccggaggagagttcggggctgagcctgctgcaccaggagagcaagcgtcgggccatgctggccgcagtattggagcaggagctgccagcgctggcggagaatctgcaccaggagcagaagcaagagcagggggcccgtctgggcagaaaccatgtggaagagctgctgcgctgcctcggggcacacatccacactcccaaccgccggcagctcgcccaggagctgcgggcgctgcaaggacggctgagggcccagggccttgggcctgcgcttctgcacagaccgctgtttgccttcccggatgcggtgaagcagatcctccgcaagcgccagatccgtccacactggatgttcgttctggactcactgctcagccgtgctgtgcgggcagccctgggtgtgctaggaccggaggtggagaaggaggcggtctcaccgaggtcagaggagctgagtaatgaaggggactcccagcagagcccaggccagcagagcccgcttccggtggagcccgagcagggccccgctcctctgatggtgcagctgagcctcttgagggcagagactgatcggctgcgcgaaatcctggcggggaaggaacgggagtaccaggccctggtgcagcgggctctacagcggctgaatgaggaagcccggacctatgtcctggccccagagcctccaactgctctttcaacggaccagggcctggtgcagtggctacaggaactgaatgtggattcaggcaccatccaaatgctgttgaaccatagcttcaccctccacactctgctcacctatgccactcgagatgacctcatctacacccgcatcaggggagggatggtatgccgcatctggagggccatcttggcacagcgagcaggatccacaccagtcacctctggaccctgagagctgaatgagggcatcataggccagacaggcccaaggatggatgaatggagaggacaaaggcagcttctgacacaccagccccaggacctggggcgactggaggaagccaggcgagtggggcccaggactggttccagtgagagaaaccaaccacaggcacccaagcactaccagacaaagcgtattaaacagaacacttttgaacctttaaaaa

SEQ ID NO: 13 - DNA, 1904 bp, Homo sapiens
aaccgactcaacagtaaggccccgcgggcgtcctggccgccatgtgcaccgtagtggaccctcgcattgtccggagatacctactcaggcggcagctcgggcagggggcctatggcattgtgtggaaggcagtggaccggaggactggtgaggtcgtggccatcaagaaaatctttgatgcttttagggataagacagatgcccagagaacattccgggaaatcacgctcctccaggagtttggggaccatcccaacatcatcagcctccttgacgtgatccgggcagagaacgacagggacatttacctggtgtttgagtttatggacactgacctgaacgcagtcatccggaagggcggcctgctgcaggacgtccacgtgcgctccatcttctaccagctcctgcgggccacccggttcctccactcggggcacgttgtgcaccgggaccagaagccgtccaatgtgctcctggatgccaactgcacagtgaagctgtgtgactttggcctggcccgctccctgggcgacctccccgaggggcctgaggaccaggccgtgacagagtacgtggccacacgctggtaccgagcaccggaggtgctgctctcttcgcaccgatacacccttggggtggacatgtggagtctgggctgtatcctgggggagatgctgcgggggagacccctgttccccggcacgtccaccctccaccagctggagctgatcctggagaccatcccaccgccatctgaggaggacctcctggctctcggctcaggctgccgtgcctctgtgctgcaccagctggggtcccggccacgacagacgctggatgccctcctaccgccagacacctccccagaggccttggacctccttaggcgactcctggtgttcgccccggacaagcggttaagcgcgacccaggcactgcagcacccctacgtgcagaggttccactgccccagcgacgagtgggcacgagaggcagatgtgcggccccgggcacacgaaggggtccagctctctgtgcctgagtaccgcagccgcgtctatcagatgatcctggagtgtggaggcagcagcggcacctcgagagagaagggcccggagggtgtctccccaagccaggcacacctgcacaaacccagagccgaccctcagctgccttctaggacacctgtgcagggtcccagacccaggccccagagcagcccaggccatgaccctgccgagcacgagtccccccgtgcagccaagaacgttcccaggcagaactccgctcccctgctccaaactgctctcctagggaatggggaaaggccccctggggcgaaggaagcgccccccttgacactctcgctggtgaagccaagcgggaggggagctgcgccctccctgacctcccaggctgcggctcaggtggccaaccaggccctgatccggggtgactggaaccggggcggtggggtgagggtggccagcgtacaacaggtccctccccggcttcctccggaggcccggcccggccggaggatgttcagcacctctgccttgcagggtgcccaggggggtgccagggctttgcttggaggctactcccaagcctacgggactgtctgccactcggcactgggccacctgcccctgctggaggggcaccatgtgtgagccgccctactcccttcacctggccctctgttcctgccccagccccttccccagacccctctccagtctcctgcaccccttagccctccctgctttgcctggcccgttgaagttccagggagcttgcccgggtctcctcgggggagcagatgagggccctgcccccgccccactgacttcctccaataaagtcatgtctgcccccaacctaaaaaaaaaaaaaaaaaa

SEQ ID NO: 14 - DNA, 6641 bp, Homo sapiens
gccctcgccgcccgcggcgccccgagcgctttgtgagcagatgcggagccgagtggagggcgcgagccagatgcggggcgacagctgacttgctgagaggaggcggggaggcgcggagcgcgcgtgtggtccttgcgccgctgacttctccactggttcctgggcaccgaaagataaacctctcataatgaaggcccccgctgtgcttgcacctggcatcctcgtgctcctgtttaccttggtgcagaggagcaatggggagtgtaaagaggcactagcaaagtccgagatgaatgtgaatatgaagtatcagcttcccaacttcaccgcggaaacacccatccagaatgtcattctacatgagcatcacattttccttggtgccactaactacatttatgttttaaatgaggaagaccttcagaaggttgctgagtacaagactgggcctgtgctggaacacccagattgtttcccatgtcaggactgcagcagcaaagccaatttatcaggaggtgtttggaaagataacatcaacatggctctagttgtcgacacctactatgatgatcaactcattagctgtggcagcgtcaacagagggacctgccagcgacatgtctttccccacaatcatactgctgacatacagtcggaggttcactgcatattctccccacagatagaagagcccagccagtgtcctgactgtgtggtgagcgccctgggagccaaagtcctttcatctgtaaaggaccggttcatcaacttctttgtaggcaataccataaattcttcttatttcccagatcatccattgcattcgatatcagtgagaaggctaaaggaaacgaaagatggttttatgtttttgacggaccagtcctacattgatgttttacctgagttcagagattcttaccccattaagtatgtccatgcctttgaaagcaacaattttatttacttcttgacggtccaaagggaaactctagatgctcagacttttcacacaagaataatcaggttctgttccataaactctggattgcattcctacatggaaatgcctctggagtgtattctcacagaaaagagaaaaaagagatccacaaagaaggaagtgtttaatatacttcaggctgcgtatgtcagcaagcctggggcccagcttgctagacaaataggagccagcctgaatgatgacattcttttcggggtgttcgcacaaagcaagccagattctgccgaaccaatggatcgatctgccatgtgtgcattccctatcaaatatgtcaacgacttcttcaacaagatcgtcaacaaaaacaatgtgagatgtctccagcatttttacggacccaatcatgagcactgctttaataggacacttctgagaaattcatcaggctgtgaagcgcgccgtgatgaatatcgaacagagtttaccacagctttgcagcgcgttgacttattcatgggtcaattcagcgaagtcctcttaacatctatatccaccttcattaaaggagacctcaccatagctaatcttgggacatcagagggtcgcttcatgcaggttgtggtttctcgatcaggaccatcaacccctcatgtgaattttctcctggactcccatccagtgtctccagaagtgattgtggagcatacattaaaccaaaatggctacacactggttatcactgggaagaagatcacgaagatcccattgaatggcttgggctgcagacatttccagtcctgcagtcaatgcctctctgccccaccctttgttcagtgtggctggtgccacgacaaatgtgtgcgatcggaggaatgcctgagcgggacatggactcaacagatctgtctgcctgcaatctacaaggttttcccaaatagtgcaccccttgaaggagggacaaggctgaccatatgtggctgggactttggatttcggaggaataataaatttgatttaaagaaaactagagttctccttggaaatgagagctgcaccttgactttaagtgagagcacgatgaatacattgaaatgcacagttggtcctgccatgaataagcatttcaatatgtccataattatttcaaatggccacgggacaacacaatacagtacattctcctatgtggatcctgtaataacaagtatttcgccgaaatacggtcctatggctggtggcactttacttactttaactggaaattacctaaacagtgggaattctagacacatttcaattggtggaaaaacatgtactttaaaaagtgtgtcaaacagtattcttgaatgttataccccagcccaaaccatttcaactgagtttgctgttaaattgaaaattgacttagccaaccgagagacaagcatcttcagttaccgtgaagatcccattgtctatgaaattcatccaaccaaatcttttattagtggtgggagcacaataacaggtgttgggaaaaacctgaattcagttagtgtcccgagaatggtcataaatgtgcatgaagcaggaaggaactttacagtggcatgtcaacatcgctctaattcagagataatctgttgtaccactccttccctgcaacagctgaatctgcaactccccctgaaaaccaaagcctttttcatgttagatgggatcctttccaaatactttgatctcatttatgtacataatcctgtgtttaagccttttgaaaagccagtgatgatctcaatgggcaatgaaaatgtactggaaattaagggaaatgatattgaccctgaagcagttaaaggtgaagtgttaaaagttggaaataagagctgtgagaatatacacttacattctgaagccgttttatgcacggtccccaatgacctgctgaaattgaacagcgagctaaatatagagtggaagcaagcaatttcttcaaccgtccttggaaaagtaatagttcaaccagatcagaatttcacaggattgattgctggtgttgtctcaatatcaacagcactgttattactacttgggtttttcctgtggctgaaaaagagaaagcaaattaaagatctgggcagtgaattagttcgctacgatgcaagagtacacactcctcatttggataggcttgtaagtgcccgaagtgtaagcccaactacagaaatggtttcaaatgaatctgtagactaccgagctacttttccagaagatcagtttcctaattcatctcagaacggttcatgccgacaagtgcagtatcctctgacagacatgtcccccatcctaactagtggggactctgatatatccagtccattactgcaaaatactgtccacattgacctcagtgctctaaatccagagctggtccaggcagtgcagcatgtagtgattgggcccagtagcctgattgtgcatttcaatgaagtcataggaagagggcattttggttgtgtatatcatgggactttgttggacaatgatggcaagaaaattcactgtgctgtgaaatccttgaacagaatcactgacataggagaagtttcccaatttctgaccgagggaatcatcatgaaagattttagtcatcccaatgtcctctcgctcctgggaatctgcctgcgaagtgaagggtctccgctggtggtcctaccatacatgaaacatggagatcttcgaaatttcattcgaaatgagactcataatccaactgtaaaagatcttattggctttggtcttcaagtagccaaaggcatgaaatatcttgcaagcaaaaagtttgtccacagagacttggctgcaagaaactgtatgctggatgaaaaattcacagtcaaggttgctgattttggtcttgccagagacatgtatgataaagaatactatagtgtacacaacaaaacaggtgcaaagctgccagtgaagtggatggctttggaaagtctgcaaactcaaaagtttaccaccaagtcagatgtgtggtcctttggcgtgctcctctgggagctgatgacaagaggagccccaccttatcctgacgtaaacacctttgatataactgtttacttgttgcaagggagaagactcctacaacccgaatactgcccagaccccttatatgaagtaatgctaaaatgctggcaccctaaagccgaaatgcgcccatccttttctgaactggtgtcccggatatcagcgatcttctctactttcattggggagcactatgtccatgtgaacgctacttatgtgaacgtaaaatgtgtcgctccgtatccttctctgttgtcatcagaagataacgctgatgatgaggtggacacacgaccagcctccttctgggagacatcatagtgctagtactatgtcaaagcaacagtccacactttgtccaatggttttttcactgcctgacctttaaaaggccatcgatattctttgctcttgccaaaattgcactattataggacttgtattgttatttaaattactggattctaaggaatttcttatctgacagagcatcagaaccagaggcttggtcccacaggccacggaccaatggcctgcagccgtgacaacactcctgtcatattggagtccaaaacttgaattctgggttgaattttttaaaaatcaggtaccacttgatttcatatgggaaattgaagcaggaaatattgagggcttcttgatcacagaaaactcagaagagatagtaatgctcaggacaggagcggcagccccagaacaggccactcatttagaattctagtgtttcaaaacacttttgtgtgttgtatggtcaataacatttttcattactgatggtgtcattcacccattaggtaaacattcccttttaaatgtttgtttgttttttgagacaggatctcactctgttgccagggctgtagtgcagtggtgtgatcatagctcactgcaacctccacctcccaggctcaagcctcccgaatagctgggactacaggcgcacaccaccatccccggctaatttttgtattttttgtagagacggggttttgccatgttgccaaggctggtttcaaactcctggactcaagaaatccacccacctcagcctcccaaagtgctaggattacaggcatgagccactgcgcccagcccttataaatttttgtatagacattcctttggttggaagaatatttataggcaatacagtcaaagtttcaaaatagcatcacacaaaacatgtttataaatgaacaggatgtaatgtacatagatgacattaagaaaatttgtatgaaataatttagtcatcatgaaatatttagttgtcatataaaaacccactgtttgagaatgatgctactctgatctaatgaatgtgaacatgtagatgttttgtgtgtatttttttaaatgaaaactcaaaataagacaagtaatttgttgataaatatttttaaagataactcagcatgtttgtaaagcaggatacattttactaaaaggttcattggttccaatcacagctcataggtagagcaaagaaagggtggatggattgaaaagattagcctctgtctcggtggcaggttcccacctcgcaagcaattggaaacaaaacttttggggagttttattttgcattagggtgtgttttatgttaagcaaaacatactttagaaacaaatgaaaaaggcaattgaaaatcccagctatttcacctagatggaatagccaccctgagcagaactttgtgatgcttcattctgtggaattttgtgcttgctactgtatagtgcatgtggtgtaggttactctaactggttttgtcgacgtaaacatttaaagtgttatattttttataaaaatgtttatttttaatgatatgagaaaaattttgttaggccacaaaaacactgcactgtgaacattttagaaaaggtatgtcagactgggattaatgacagcatgattttcaatgactgtaaattgcgataaggaaatgtactgattgccaatacaccccaccctcattacatcatcaggacttgaagccaagggttaacccagcaagctacaaagagggtgtgtcacactgaaactcaatagttgagtttggctgttgttgcaggaaaatgattataactaaaagctctctgatagtgcagagacttaccagaagacacaaggaattgtactgaagagctattacaatccaaatattgccgtttcataaatgtaataagtaatactaattcacagagtattgtaaatggtggatgacaaaagaaaatctgctctgtggaaagaaagaactgtctctaccagggtcaagagcatgaacgcatcaatagaaagaactcggggaaacatcccatcaacaggactacacacttgtatatacattcttgagaacactgcaatgtgaaaatcacgtttgctatttataaacttgtccttagattaatgtgtctggacagattgtgggagtaagtgattcttctaagaattagatacttgtcactgcctatacctgcagctgaactgaatggtacttcgtatgttaatagttgttctgataaatcatgcaattaaagtaaagtgatgcaacatcttgtaaaaaaaaaaaaaaaaaaaa

SEQ ID NO: 15 - DNA, 10389 bp, Homo sapiens
tccggtcggcattttgttctgagagggagagacggaacgagagagagacacacacagggctccttccccccgccctcccccccctccctccgtcggtaccgactcacccgacaccaccaagccgcagggagggacgcccccgccgacaggagaattggttcccgggcccgcggcgatgcccccccggtagctcgggcccgtggtcgggtgtttgtgagtgtttctatgtgggagaaggaggaggaggaggaagaagaagcaacgatttgtcttctcggctggtctccccccggctctacatgttccccgcactgaggagacggaagaggagccgtagccaccccccctcccggcccggattatagtctctcgccacagcggcctcggcctccccttggattcagacgccgattcgcccagtgtttgggaaatgggaagtaatgacagctggcacctgaactaagtacttttataggcaacaccattccagaaattcaggatgaatggggatatgccccatgtccccattactactcttgcggggattgctagtctcacagacctcctgaaccagctgcctcttccatctcctttacctgctacaactacaaagagccttctctttaatgcacgaatagcagaagaggtgaactgccttttggcttgtagggatgacaatttggtttcacagcttgtccatagcctcaaccaggtatcaacagatcacatagagttgaaagataaccttggcagtgatgacccagaaggtgacataccagtcttgttgcaggccgtcctggcaaggagtcctaatgttttcagggagaaaagcatgcagaacagatatgtacaaagtggaatgatgatgtctcagtataaactttctcagaattccatgcacagtagtcctgcatcttccaattatcaacaaaccactatctcacatagcccctccagccggtttgtgccaccacagacaagctctgggaacagatttatgccacagcaaaatagcccagtgcctagtccatacgccccacaaagccctgcaggatacatgccatattcccatccttcaagttacacaacacatccacagatgcaacaagcatcggtatcaagtcccattgttgcaggtggtttgagaaacatacatgataataaagtttctggtccgttgtctggcaattcagctaatcatcatgctgataatcctagacatggttcaagtgaggactacctacacatggtgcacaggctaagtagtgacgatggagattcttcaacaatgaggaatgctgcatcttttcccttgagatctccacagccagtatgctcccctgctggaagtgaaggaactcctaaaggctcaagaccacctttaatcctacaatctcagtctctaccttgttcatcacctcgagatgttccaccagatatcttgctagattctccagaaagaaaacaaaagaagcagaagaaaatgaaattaggcaaggatgaaaaagagcagagtgagaaagcggcaatgtatgatataattagttctccatccaaggactctactaaacttacattaagactttctcgtgtaaggtcttcagacatggaccagcaagaggatatgatttctggtgtggaaaatagcaatgtttcagaaaatgatattccttttaatgtgcagtacccaggacagacttcaaaaacacccattactccacaagatataaaccgcccactaaatgctgctcaatgtttgtcgcagcaagaacaaacagcattccttccagcaaatcaagtgcctgttttacaacagaacacttcagttgctgcaaaacaaccccagacttctgtggtacagaatcaacaacagatatcacaacagggacctatatatgatgaagtggaattggatgcattggctgaaattgagcgaatagagagagaatcagctattgaaagggagcgcttctcaaaagaagttcaagataaagataagcctttgaaaaaaagaaaacaagattcttacccacaggaggctgggggtgctacaggaggtaatagaccagcttctcaggagacgggttctacgggaaatgggtcaaggccagcattaatggttagcattgatcttcatcaggcaggaagagtggactctcaggcttctataactcaggattcagactccataaaaaagcctgaagaaatcaaacaatgtaatgatgcacctgtttctgttcttcaggaagatattgttggaagtcttaaatctacaccagaaaaccatcctgagacacctaaaaaaaagtctgatcctgagctttcaaagagtgaaatgaaacaaagtgaaagtagattagcagaatctaaaccaaatgaaaaccgattggtggagacaaaatcaagtgaaaataagttagaaactaaagttgagacccaaacagaagaacttaaacagaatgagagcagaacaactgaatgcaaacaaaacgagagcaccatagttgagcctaaacaaaatgaaaatagactgtctgacacaaaaccaaatgacaacaaacaaaataatggcagatcagaaacaacaaaatcaaggcctgaaaccccaaagcaaaagggtgaaagccggcctgagactccaaaacaaaagagtgatgggcatcctgaaaccccaaaacagaagggtgatggaaggcctgaaactccaaagcaaaaaggtgagagccgccctgaaactccaaagcaaaaaaatgaagggcgacctgaaacaccaaaacacaggcatgacaataggagggattctggaaagccatctacagagaaaaaacctgaagtgtctaaacataaacaagatactaaatctgactcacctcggttaaaatcagaacgagctgaagccttaaagcagagacctgatgggcgatctgtttctgagtcactaagacgtgaccatgataataaacaaaaatcagatgacaggggtgaatcagagcgacatcgaggggatcagtctagggttcgaagaccagaaacattgagatcctctagtagaaatgaacatggcattaaatctgatagttcaaaaactgataaactagaacgaaaacacaggcatgaatcaggggactcaagggaaagaccatcttctggggaacaaaaatcaagacctgacagtcctcgtgttaaacaaggagattctaataaatcaagatctgataaacttggttttaaatcaccaactagtaaagatgacaaaaggacagagggtaacaagagtaaagtagacactaataaagcacaccctgacaataaggcagaatttccaagttatttgttggggggcaggtctggtgcgttgaaaaattttgtcattccgaaaatcaagagggataaagatggcaatgttactcaggagacaaagaaaatggaaatgaaaggagagccgaaagacaaagtagaaaaaataggattagttgaagatctaaataaaggagctaagcctgtagttgtgctacaaaaactgtctttggatgatgttcagaaacttattaaagatagagaggacaaatcaagaagttcccttaaacctatcaagaataaaccatcaaagtcaaataaaggtagtatagatcaatcagtgttaaaagaattaccccctgaactcctggcagaaattgagtccaccatgccactttgtgaacgtgtgaaaatgaacaaacgcaagcgtagcacagttaatgaaaagccaaaatatgctgaaatcagttcagatgaagataatgatagtgatgaagcttttgaatcctctaggaaacgacataaaaaagatgatgataaagcttgggaatatgaagagcgtgacagaagaagctctggggatcataggagaagtggccactctcatgaaggaagaaggagttcaggtggtggtcgttatcgaaaccgaagtccgtcagattctgacatggaagattattctcctcctcccagccttagtgaggttgctaggaaaatgaagaaaaaagaaaaacagaagaaaaggaaagcatatgaaccaaaactaacacctgaagaaatgatggactcttcaacttttaagagattcacagcctcaatagagaatattttggataatttggaagatatggattttactgcgtttggtgatgatgatgaaattcctcaggaactgctcttaggaaaacatcagcttaatgaacttggcagtgaatctgctaaaataaaagcaatgggtataatggataagctttcaactgacaaaactgtgaaagtcttaaatatcttggagaagaatattcaggatgggtcaaagctttccactttgttaaatcataataacgatactgaagaagaagaaaggttatggagagaccttattatggagagagttacaaaatcagcggatgcttgtcttacaactatcaacattatgacatcccctaacatgccaaaagctgtgtacattgaggatgtaattgaaagagttatacagtacactaaatttcatttgcagaatacactttatcctcagtatgatcctgtttacagattagatcctcatggaggaggcttattaagttcaaaagcaaaacgggctaaatgttctacccataagcagagagtaatagtaatgctttataacaaagtttgtgacattgttagcagcttatcagaattgctagagatacaacttcttacagacacaacaattcttcaggtttcatctatgggaataacaccattttttgtggaaaatgtcagtgaactacagttgtgtgccattaagttagtcactgcagtattctcaagatatgaaaaacataggcagttaattttggaagaaatttttacttcacttgcaagattaccaaccagcaagaggagtttaaggaacttcaggttaaacagtagtgatatggatggagaacctatgtatattcagatggttacagcactggttttacaacttattcagtgtgtggtacacttaccatcatcagagaaggactctaatgcagaagaagattcaaataaaaaaattgaccaggatgttgtcattactaactcttatgaaacagctatgcgaacagcccaaaacttcctctccatcttccttaaaaaatgtggtagtaagcaaggtgaagaagattacagaccactgtttgaaaattttgttcaagaccttctttcaacagtcaataagcctgaatggccagctgctgaactactccttagtttgttagggagactgttggttcatcagttcagtaacaagtcaacagagatggctttaagagtggcatctcttgattaccttggaactgttgctgcacggctaagaaaagatgctgttacaagcaaaatggatcaaggatctatagaacgcattttaaaacaggtttcaggaggggaagatgaaatccaacaattacaaaaagcattgcttgattacttggatgaaaacactgagactgatccttcactagtgttttctcgtaaattctatatagcccagtggtttcgagacacaactctggaaacagaaaaagcaatgaaatcacaaaaagatgaagaatcatctgaaggaacacatcatgcaaaggaaattgagacaactggccaaattatgcatcgagctgaaaaccgaaaaaagtttcttagaagcattatcaaaaccacaccttctcagtttagcacattaaagatgaactctgatactgtggactatgatgatgcttgcttgattgttcgatacttggcctccatgaggccgtttgcccagagctttgatatttatttgacacagatcctacgagttcttggtgaaaatgcaattgctgttcgaacaaaagccatgaagtgtttgtctgaggttgttgctgtagaccccagtattctagcaaggcttgatatgcaacgaggtgttcatggacgattgatggataattcgactagtgtccgagaagcagcagtagaattactaggtcgatttgtcctttgtcgacctcagcttgctgaacagtattatgatatgctgattgaaagaatattggatactggtatcagtgtcaggaaaagagtaataaagattctcagagacatttgtattgaacaaccaacatttccaaaaatcacagaaatgtgtgtaaaaatgattcgcagagtcaatgatgaagagggcattaagaaattagtaaatgaaacattccagaaactctggtttactccaactccacacaatgacaaagaagcaatgacaaggaaaattttaaacattaccgatgtggttgcagcatgcagagatactggatatgactggtttgagcaactgcttcaaaacttgttgaagtccgaagaggattcctcatataaacctgtgaagaaagcttgtactcaacttgttgataacctagttgagcacattcttaaatatgaggaatctctagctgactctgacaataaaggtgtgaattctggaagattggtagcttgcataaccactttgttcttattcagcaaaataagaccccagctcatggttaaacatgcaatgactatgcaaccataccttaccactaaatgtagtacgcaaaatgatttcatggttatctgcaatgttgcaaaaatcctagagctagttgtaccactgatggagcatccaagtgaaacttttcttgccactattgaggaagatctaatgaagctcatcatcaaatatggcatgactgtagtgcaacattgtgtgagctgtcttggagctgttgtaaataaagtgacacaaaattttaaatttgtgtgggcttgtttcaatagatactatggtgccatttcaaaattaaaaagtcaacaccaagaggacccaaataacacttcacttctaacaaacaaaccagcacttcttagatcccttttcaccgttggagcactatgtcggcattttgattttgatctggaagattttaaaggcaacagcaaggttaacataaaagataaagtacttgaactattgatgtattttacaaaacactcagatgaagaagtacaaacaaaagctatcattggtctaggatttgcctttattcagcatccaagtctaatgttcgagcaagaagtgaagaatctatataataatattttatctgataagaactcctcagtcaatttaaaaatacaagtgttaaaaaacctccagacctacctacaagaagaagatacacgtatgcagcaggcagatagagactggaagaaagttgcaaaacaggaagacttaaaagaaatgggtgatgtttcctcagggatgagtagttccatcatgcagctttatctcaaacaggtgcttgaggcattttttcacacccagtcaagtgtacgccactttgccctaaatgtcattgcattgactctaaatcaaggtcttattcatccagttcagtgtgtgccatatttaattgctatgggcacagacccagaacctgctatgcggaacaaggctgatcagcaacttgtggaaatagacaaaaaatatgctggattcattcatatgaaagcagtggctggtatgaagatgtcttaccaggtacaacaggcaatcaacacatgcctaaaagatcctgtaaggggtttcagacaagacgagtcctctagcgctttgtgttcacacctttactccatgatccgtggaaaccgccaacacagacgagcctttcttatttctttactcaacctctttgatgacacagcaaaaacagacgtgactatgctcttgtatatagcagacaatctagcctgttttccataccagacacaggaagagccgttgtttataatgcatcatatagacattacactctcagtttctggtagtaacctactgcagtcattcaaggagtctatggtaaaggacaaaaggaaagagagaaaatcatcacctagtaaggaaaatgagtcaagcgacagtgaagaagaagtttccaggcctcggaagtcacggaaacgtgtagattcagattcagattcagattcagaagacgatataaattcagtgatgaaatgtttgccagaaaattcagctcctttaatcgaatttgcaaatgtgtcccagggtattttattacttctcatgttaaaacaacatttgaagaatctttgtggattttctgatagtaaaattcagaagtactctccatctgaatctgcaaaagtatatgataaagcgataaaccgaaaaacaggagttcattttcatccaaaacaaacactggacttcctgcggagtgacatggctaattccaaaatcacagaagaggtgaaaaggagtatagtaaaacagtatctagatttcaaacttctcatggaacatctggaccctgatgaagaagaagaagaaggggaggtttcagctagcacaaatgctcggaacaaagcaattacctcactgcttggaggaggcagccctaaaaataatacagcagcagagacagaagatgatgaaagtgatggggaggatagaggaggaggcacttcaggggtgaggcggaggaggagtcaacgtatttcgcagcgtattacgtaaaatgatttttatgtgcttatatatgtcagtctattaaatgtacaccaagtaatgtaatacttaaaagagaaaacattttgtagatagagattctctacttacccgtttatacatccttttgtagaaagtttaacataaaagacaataaaaaaacagaaatgagatttatccagcataaagggttaatttttctttgaattgtattaatgtgtgttatttttattgttgctaagttttatgtagctatatggttcatatgtatatataattttatatatcaataagagtaaagacacgggtacaaattaagagttatatggttttacaagtatatgttaaccccttggcgctggcggtcacggtgcgtctcattgccggcaatggaagtgtgccgggaaatcccaactcccggcgtcaagggattaaaagcaataaaaacaataatttcactaaaattcttttgtgtaacacttggtcttttttcccccctcccaatgttttagtcattgagaaggtcaaaacgaaattcagactctacggagttggcagcacagatgaatgaaagtgttgacgtcatggatgtcatcgctatttgctgtccaaagtacaaagatcgaccacaaattgcaagagtagtgcagaaaaccagcagtggcttcagtgttcagtggatggcaggctcctacagtggctcctggactgaggctaagcgccgtgatggccgcaaactggtgccttgggtagacactattaaagagtcagacattatttacaaaaaaattgctctaacgagtgctaataagctgactaataaagttgttcagactttacgatccctgtatgccgccaaggatgggacttccagctaatgaatttgtacatgcagccaaatttacaggaatttttttaaaaggcagaaaaacttgaaataccaacattctggcaaaaaaaaatcagttttatgaagagtaagtggaacctgggatgcaggaacaaaagaaggaaatgttgggcaaacatttttgtgggagctcccttcgctgttgtgcagcagaaacagattctcagttcatttttactcccactgtattatagtttaacaaaaattgtttatatcttggaaaaaaaactttctgtttaaaaaaaataaacaagtgaatgttggaaattagtctgttaatgttcttaataaagtgttcttggagtttaacctagcagcggatggctttctttagcttagcccagtttccagggaagcattgttttttccaggctgtaaaatggcagaatctcctggatatataatttattctgttgaaaaaaaaaaaagcatgcagtatctatgacctatctgcagaaggagtttttgtaaatgtagattttgatgtattaggtcaccctgaaaacaatacaagaaaagggatccccaggtaatctggtggagcgaatactgcaataaatttttttacttctctttgttacttgtctgtttccatttgaatttcttattgtaaaaatctgtttaaatccatttatattattttacagtcttttatgtaaaatttattatatcactggttttcaaagcaaaacataaaatattgtttatacagtttgtataggctgacttctgaataattggtatctattattttcattcccataagagggtgtaaacaattaactccagggttttattgtatcctgcaatatttagtattaactatatatgatttagcactgtgccaaacacattttcaagagtacattttgatataaaaagaaactatagttta

SEQ ID NO: 16 - DNA, 7042 bp, Homo sapiens
caacgtgctgagctaatagcgacagatagagggcagacagattcctgctagcagcttagtgttagttgcttgtggtaactaaggcaggtggcatacatctcagaacgtggagaatgatggtatgctttctgagttaacatgttgaactgttttgcttttctaaaaattttcctagtaacattttcttgatgatatgagagtggatatcaatgcctcacagaaacaagaggtggaacatgtgaatgaatcgtcttggaactagattatgagcactggttctttttaaagggatgtgcaagaggcagccttggcaagaaaacttgctgcataatcttacatggactaaagatgaaactttaaaccgcaaatcagctttgagtgaactttgacagaagatgtttcgacagttttatctctggacatgtttagcttcagggatcatcctgggctctctctttgaaatctgcttgggccagtatgatgatgactggcaatatgaggattgcaaactagctaggggaggaccaccagctaccatagttgctattgatgaagaaagtcggaatggtacaattctggtggacaacatgctgatcaaagggactgctggaggaccagaccccaccatagaactttctttaaaggataatgtggattactgggtgttgatggatcctgttaagcaaatgcttttcctgaacagcaccggaagagttctggatagagatccaccgatgaacatacactccattgtggtgcaggtccagtgcatcaacaaaaaagtgggcactattatctaccatgaagtgcgaatagtggtgagagacaggaatgacaactcacccactttcaagcatgaaagctactatgccacagtgaatgagctcactccagttggtaccacaatattcacaggattttcaggagacaatggagctacagatatagatgatggaccaaatggacagatagagtatgttattcagtataatccagatgatccgacatccaatgacacctttgaaattcccctaatgttgactggaaatatagtgttaaggaagaggctcaactatgaagataagactcgctactttgtcataatccaagctaatgaccgtgcccaaaatctgaatgagaggcgaaccaccaccaccactctcacagtggatgttctggatggagatgacttgggtccaatgtttcttccttgtgtccttgtgccaaacactcgtgattgccgtccactcacttatcaagctgccatacctgagttgagaactccggaagaactgaaccccattattgttacgccaccaatccaagccattgatcaggaccggaatattcaaccgccatcagataggccaggaatcctctattccatccttgttgggactcctgaggattacccacgatttttccatatgcatcctaggacagcagaacttagtctcctggagccagtaaacagagactttcaccagaaatttgatttggttattaaggctgaacaagacaatggtcatcctcttcctgcctttgccggtctacacattgaaatactggatgaaaacaatcaaagtccatattttacaatgcccagttatcaaggctatatcctggaatctgccccagtgggagcaaccatttcggacagtctcaatttgacttcacctttaagaatagtagctctggacaaggacatagaagatacaaaagacccagagcttcacctttttctgaatgactacacctcagtcttcaccgtcacacagactggtattactcgctacctcaccttacttcaaccagtggacagggaagaacagcaaacttacaccttttcgataacagcatttgatggtgtacaagaaagtgagccagtcatcgtcaatattcaagtgatggatgcaaatgataacacgccaaccttccctgaaatatcctatgatgtgtatgtttatacagacatgagacctggggacagtgtcatacagctcactgcagtcgacgcagacgaagggtcaaatggggagatcacatatgaaatccttgttggggctcagggagacttcatcatcaataaaacaacagggcttatcaccatcgctccaggggtggaaatgatagtcgggcggacttacgcactcacggtccaagcagcggataatgctcctcctgcagagcgaaggaactccatctgcactgtgtatattgaagtgcttccaccaaataatcaaagccctcctcgcttcccacagctgatgtatagccttgaaattagtgaagccatgagggttggtgctgttttattaaatctacaggcaactgatcgagagggagactcaataacatatgccattgagaatggagatcctcagagagtttttaatctttcagaaaccacggggattctaaccttagggaaagcactggacagggaaagcactgatcgctacattctgatcatcacagcttcagatggcaggccagatgggacctcaactgccacagtaaacatagtggtgacagatgtcaatgacaatgctccagtgtttgatccttatctgccaagaaatttatctgtggtggaagaagaagccaatgcctttgtgggtcaagtaaaagcaacagaccctgatgctggaataaatggtcaagtgcactacagtttgggtaactttaataatctttttcgtatcacatccaatgggagcatttacacagcagtgaagcttaacagagaagtcagggactactatgaacttgttgttgtggcaacagatggagcagtacaccctcgtcattcaactctaaccttggccatcaaggttttggacattgatgataacagtcctgtgttcaccaattcaacatacactgtccttgttgaagagaatttgccagctgggactaccatccttcaaatagaggccaaagatgtcgaccttggagcaaatgtgtcttaccggataagaagcccagaagtgaagcacttttttgcactacatccatttacaggagaactatcgcttttaaggagtttagattatgaggcatttccagaccaagaagcaagtatcacttttctggtagaggcctttgatatttatggaacaatgccacctggtattgctactgtcacagtgattgtaaaggatatgaatgattatcctcctgtctttagtaaacgaatatacaaagggatggtggctccggatgcagtcaagggtacacctatcacaacagtttatgctgaagatgcagaccctcctggattacctgcaagtcgtgtgaggtatagagtagatgatgtacagtttccttaccctgccagtatttttgaagtggaagaagattctggaagagtaataacacgagtcaatcttaatgaagaacctacaacaatttttaagttggtggtggttgcttttgatgatggggagcctgtgatgtccagcagtgccacagtgaagattcttgtcttacatcctggtgagatcccacgcttcacacaggaggaatatagacctcctccagtaagtgaacttgccaccaaagggaccatggttggtgtaatttctgctgctgccattaatcaaagtattgtgtactccattgtttcaggaaatgaagaagatacatttggaattaataacatcacaggtgttatctatgtgaatggacctctggattatgagaccaggacaagctatgtacttcgagtccaagctgattccctggaagtggtccttgccaatctccgagttccttcaaaaagcaatacagctaaagtatacattgagattcaggatgaaaataatcatcccccagtgtttcagaaaaaattctacatcggaggtgtatctgaagatgcaagaatgtttacttctgtactcagagtgaaggctactgataaagatactggcaattatagtgtcatggcctacagactcataataccaccaattaaagagggaaaagaaggatttgtagtggaaacatatacagggcttatcaaaactgctatgctcttccataatatgaggagatcctacttcaagtttcaagttattgcaactgacgactatgggaagggactgagcggcaaagccgatgtactcgtctccgtggtcaatcagctggatatgcaagtcattgtttccaatgtgcctcctactctagtggaaaaaaagatagaagatcttacagagatcttggatcgctatgttcaggaacaaattcctggtgccaaggtcgtagtggagtccattggagctcgccggcatggagatgccttttccctagaagattacaccaaatgtgacttgactgtctatgcaattgacccccaaaccaacagagccatcgatagaaatgagctttttaaatttttggatggcaaactacttgatatcaataaagactttcagccgtattatggggaaggaggacgcattctggagatccggactccagaggcagtgaccagcattaaaaagagaggagaaagtctaggatacacagaaggggccttgttggctctggccttcatcatcatcctctgctgcattcctgccatcttggtggttttggtcagctacagacagtttaaagtacgtcaagctgagtgtacaaagactgcacgaattcaggccgcattacccgcggctaaaccagcagtgccggctcctgcaccagtggcagcgcccccgccgccgccgccgcctccgccaggtgcgcatctctatgaagaacttggagacagctcaatgcataatcttttccttctctaccattttcaacaaagcaggggaaataactcagtctcagaagacaggaaacatcaacaagttgtgatgcccttttcttccaatactattgaggctcacaagtcagctcatgtagacggatcacttaagagcaacaaactgaagtctgcaagaaaattcacatttctatctgatgaggatgacttaagtgcccataatcccctttataaggaaaacataagtcaagtatcaacaaattcagacatttcacagagaacagattttgtagacccattttcacccaaaatacaagccaagagtaagtctctgaggggcccaagagaaaagattcagaggctgtggagtcagtcagtcagcttacccaggaggctgatgaggaaagttccaaatagaccagagatcatagatctgcagcagtggcaaggcaccaggcagaaagctgaaaatgaaaacactggaatctgtacaaacaaaagaggtagcagcaatccattgcttacaactgaagaggcaaatttgacagagaaagaggaaataaggcaaggtgaaacactgatgatagaaggaacagaacagttgaaatctctctcttcagactcttcattttgctttcccaggcctcacttctcattctccactttgccaactgtttcaagaactgtggaactcaaatcagaacctaatgtcatcagttctcctgctgagtgttccttggaactttctccttcaaggccttgtgttttacattcttcactctctaggagagagacacctatttgtatgttacctattgaaaccgaaagaaatatttttgaaaattttgcccatccaccaaacatctctccttctgcctgtccccttccccctcctcctcctatttctcctccttctcctcctcctgctcctgctcctcttgctcctcctcctgacatttctcctttttctcttttttgtcctcctccctctcctccttctatccctcttcctcttcctcctcctacattttttccactttccgtttcaacgtctggtcccccaacaccacctcttctacctccatttccaactcctcttcctccaccacctccttctattccttgccctccacctccttcagcttcatttctgtccacagagtgtgtctgtataacaggtgttaaatgcacgaccaacttgatgcctgccgagaaaattaagtcctctatgacacagctatcaacaacgacagtgtgtaaaacagaccctcagagagaaccaaaaggcatcctcagacacgttaaaaacttagcagaacttgaaaaatcagtagctaacatgtacagtcaaatagaaaaaaactatctacgcacaaatgtttcagaacttcaaactatgtgcccttcagaagtaacaaatatggaaatcacatctgaacaaaacaaggggagtttgaacaatattgtcgagggaactgaaaaacaatctcacagtcaatctacttcactgtaatgttgcttttcttattttagtcgggcaaacctcttgttgatcatagtcttcaagttgaacatcaaatttgaacgtcaaagaagactctattattttaccccaaattcaatgaaatgcagttttttttctcgtttttaatttaaaaagatattaacctcatcactactaactcactcatataatagatttaccttactttttaaaaactacaaagtagcataatttgttctacatttatttgaaaagtaagtaattttaatctcttttttagtgggaatatgtgggcatgaaaattagatacccaacttaaaccaaaggcatgtctatcatgtggatgcagtaacatttacatttagtttttgatcgtagttttatatgaatgttccaagaaaaaagcagactgttacaaataagttaaaactgatatgattgataggttctgttttttcttgaagcctatgtatttggtaagaagaaatactaccgaagtaaaatataatgtacctagattgtaggagatgacagacataaggtatttcaaaataaatctcaggtgctataacatgtagtcatctgttttctgataagaacatcttttactctgacttgcttttatcttagtagtatgcttatggatttagtagtatgcttatggatttgataaatcttatactttttcagttgctgtcttattctctttatttctcattgtgctttcccttcccttctttataatgaaaataaatcttgagtcgttg

SEQ ID NO: 17 - DNA, 1626 bp, Homo sapiens
taaagaagtcccggccgggccgctgcactccccgcgcgcatccgtgcgccgcccgaggctgtctaaggagtcggcggccattttgttcttctcgtggttccagtggggagagaaggaggaagtagggagcggggtggcaggggggggacccgccgcggctgctgccaccgccgccaccaccgcctctgctcgtggcgtgggaaaggaggtgtgagtcccgggcgcgagccggcggcggcgccgctgcgggagggtcggcggtgggaaggcgatggcggatttagataaactcaacatcgacagcattatccaacggctgctggaagtgagagggtccaagcctggtaagaatgtccagcttcaggagaatgaaatcagaggactgtgcttaaagtctcgtgaaatctttctcagtcagcctatcctactagaacttgaagcaccactcaaaatatgtggtgacatccatggacaatactatgatttgctgcgactttttgagtacggtggtttcccaccagaaagcaactacctgtttcttggggactatgtggacaggggaaagcagtcattggagacgatctgcctcttactggcctacaaaataaaatatcctgagaatttttttcttctcagagggaaccatgaatgtgccagcatcaacagaatttatggattttatgatgaatgtaaaagaagatacaacattaaactatggaaaactttcacagactgttttaactgtttaccgatagcagccatcgtggatgagaagatattctgctgtcatggaggtttatcaccagatcttcaatctatggagcagattcggcgaattatgcgaccaactgatgtaccagatcaaggtcttctttgtgatcttttgtggtctgaccccgataaagatgtcttaggctggggtgaaaatgacagaggagtgtccttcacatttggtgcagaagtggttgcaaaatttctccataagcatgatttggatcttatatgtagagcccatcaggtggttgaagatggatatgaattttttgcaaagaggcagttggtcactctgttttctgcgcccaattattgcggagagtttgacaatgcaggtgccatgatgagtgtggatgaaacactaatgtgttcttttcagattttaaagcctgcagagaaaaagaagccaaatgccacgagacctgtaacgcctccaagggttgcatcaggcctgaacccgtccattcagaaagcttcaaattatagaaacaatactgttctatacgagtgaccgattatgctttctttggcctacattctttattctgcggtgaagttgaggcttataagttaaaacaaaggaactaacttactgtccaccagtttatacagaactcacagtacctatgacttttttaaactaagatctgttaaaaaagaaatctgtttcaacagatgaccgtgtacaataccgtgtggtgaaaatgaattcagacttattaaatgatgaacttgttaaatcttctcagtgtctatttatcagcacaatacacacaggagaactgttgatggcatattgaatagattttcctgaataaattgctctggaaaccacacaaaaaaaaaaaaaaa

SEQ ID NO: 18 - DNA, 7957 bp, Homo sapiens
gcgcccgccgtgtgagcagcagcagcggctggtctgtcaaccggagcccgagcccgagcagcctgcggccagcagcgtcctcgcaagccgagcgcccaggcgcgccaggagcccgcagcagcggcagcagcgcgccgggccgcccgggaagcctccgtccccgcggcggcggcggcggcggcggcaacatggcctcggctggtaacgccgccgagccccaggaccgcggcggcggcggcagcggctgtatcggtgccccgggacggccggctggaggcgggaggcgcagacggacgggggggctgcgccgtgctgccgcgccggaccgggactatctgcaccggcccagctactgcgacgccgccttcgctctggagcagatttccaaggggaaggctactggccggaaagcgccgctgtggctgagagcgaagtttcagagactcttatttaaactgggttgttacattcaaaaaaactgcggcaagttcttggttgtgggcctcctcatatttggggccttcgcggtgggattaaaagcagcgaacctcgagaccaacgtggaggagctgtgggtggaagttggaggacgagtaagtcgtgaattaaattatactcgccagaagattggagaagaggctatgtttaatcctcaactcatgatacagacccctaaagaagaaggtgctaatgtcctgaccacagaagcgctcctacaacacctggactcggcactccaggccagccgtgtccatgtatacatgtacaacaggcagtggaaattggaacatttgtgttacaaatcaggagagcttatcacagaaacaggttacatggatcagataatagaatatctttacccttgtttgattattacacctttggactgcttctgggaaggggcgaaattacagtctgggacagcatacctcctaggtaaacctcctttgcggtggacaaacttcgaccctttggaattcctggaagagttaaagaaaataaactatcaagtggacagctgggaggaaatgctgaataaggctgaggttggtcatggttacatggaccgcccctgcctcaatccggccgatccagactgccccgccacagcccccaacaaaaattcaaccaaacctcttgatatggcccttgttttgaatggtggatgtcatggcttatccagaaagtatatgcactggcaggaggagttgattgtgggtggcacagtcaagaacagcactggaaaactcgtcagcgcccatgccctgcagaccatgttccagttaatgactcccaagcaaatgtacgagcacttcaaggggtacgagtatgtctcacacatcaactggaacgaggacaaagcggcagccatcctggaggcctggcagaggacatatgtggaggtggttcatcagagtgtcgcacagaactccactcaaaaggtgctttccttcaccaccacgaccctggacgacatcctgaaatccttctctgacgtcagtgtcatccgcgtggccagcggctacttactcatgctcgcctatgcctgtctaaccatgctgcgctgggactgctccaagtcccagggtgccgtggggctggctggcgtcctgctggttgcactgtcagtggctgcaggactgggcctgtgctcattgatcggaatttcctttaacgctgcaacaactcaggttttgccatttctcgctcttggtgttggtgtggatgatgtttttcttctggcccacgccttcagtgaaacaggacagaataaaagaatcccttttgaggacaggaccggggagtgcctgaagcgcacaggagccagcgtggccctcacgtccatcagcaatgtcacagccttcttcatggccgcgttaatcccaattcccgctctgcgggcgttctccctccaggcagcggtagtagtggtgttcaattttgccatggttctgctcatttttcctgcaattctcagcatggatttatatcgacgcgaggacaggagactggatattttctgctgttttacaagcccctgcgtcagcagagtgattcaggttgaacctcaggcctacaccgacacacacgacaatacccgctacagccccccacctccctacagcagccacagctttgcccatgaaacgcagattaccatgcagtccactgtccagctccgcacggagtacgacccccacacgcacgtgtactacaccaccgctgagccgcgctccgagatctctgtgcagcccgtcaccgtgacacaggacaccctcagctgccagagcccagagagcaccagctccacaagggacctgctctcccagttctccgactccagcctccactgcctcgagcccccctgtacgaagtggacactctcatcttttgctgagaagcactatgctcctttcctcttgaaaccaaaagccaaggtagtggtgatcttcctttttctgggcttgctgggggtcagcctttatggcaccacccgagtgagagacgggctggaccttacggacattgtacctcgggaaaccagagaatatgactttattgctgcacaattcaaatacttttctttctacaacatgtatatagtcacccagaaagcagactacccgaatatccagcacttactttacgacctacacaggagtttcagtaacgtgaagtatgtcatgttggaagaaaacaaacagcttcccaaaatgtggctgcactacttcagagactggcttcagggacttcaggatgcatttgacagtgactgggaaaccgggaaaatcatgccaaacaattacaagaatggatcagacgatggagtccttgcctacaaactcctggtgcaaaccggcagccgcgataagcccatcgacatcagccagttgactaaacagcgtctggtggatgcagatggcatcattaatcccagcgctttctacatctacctgacggcttgggtcagcaacgaccccgtcgcgtatgctgcctcccaggccaacatccggccacaccgaccagaatgggtccacgacaaagccgactacatgcctgaaacaaggctgagaatcccggcagcagagcccatcgagtatgcccagttccctttctacctcaacggcttgcgggacacctcagactttgtggaggcaattgaaaaagtaaggaccatctgcagcaactatacgagcctggggctgtccagttaccccaacggctaccccttcctcttctgggagcagtacatcggcctccgccactggctgctgctgttcatcagcgtggtgttggcctgcacattcctcgtgtgcgctgtcttccttctgaacccctggacggccgggatcattgtgatggtcctggcgctgatgacggtcgagctgttcggcatgatgggcctcatcggaatcaagctcagtgccgtgcccgtggtcatcctgatcgcttctgttggcataggagtggagttcaccgttcacgttgctttggcctttctgacggccatcggcgacaagaaccgcagggctgtgcttgccctggagcacatgtttgcacccgtcctggatggcgccgtgtccactctgctgggagtgctgatgctggcgggatctgagttcgacttcattgtcaggtatttctttgctgtgctggcgatcctcaccatcctcggcgttctcaatgggctggttttgcttcccgtgcttttgtctttctttggaccatatcctgaggtgtctccagccaacggcttgaaccgcctgcccacaccctcccctgagccaccccccagcgtggtccgcttcgccatgccgcccggccacacgcacagcgggtctgattcctccgactcggagtatagttcccagacgacagtgtcaggcctcagcgaggagcttcggcactacgaggcccagcagggcgcgggaggccctgcccaccaagtgatcgtggaagccacagaaaaccccgtcttcgcccactccactgtggtccatcccgaatccaggcatcacccaccctcgaacccgagacagcagccccacctggactcagggtccctgcctcccggacggcaaggccagcagccccgcagggacccccccagagaaggcttgtggccacccccctacagaccgcgcagagacgcttttgaaatttctactgaagggcattctggccctagcaatagggcccgctggggccctcgcggggcccgttctcacaaccctcggaacccagcgtccactgccatgggcagctccgtgcccggctactgccagcccatcaccactgtgacggcttctgcctccgtgactgtcgccgtgcacccgccgcctgtccctgggcctgggcggaacccccgagggggactctgcccaggctaccctgagactgaccacggcctgtttgaggacccccacgtgcctttccacgtccggtgtgagaggagggattcgaaggtggaagtcattgagctgcaggacgtggaatgcgaggagaggccccggggaagcagctccaactgagggtgattaaaatctgaagcaaagaggccaaagattggaaaccccccacccccacctctttccagaactgcttgaagagaactggttggagttatggaaaagatgccctgtgccaggacagcagttcattgttactgtaaccgattgtattattttgttaaatatttctataaatatttaagagatgtacacatgtgtaatataggaaggaaggatgtaaagtggtatgatctggggcttctccactcctgccccagagtgtggaggccacagtggggcctctccgtatttgtgcattgggctccgtgccacaaccaagcttcattagtcttaaatttcagcatatgttgctgctgcttaaatattgtataatttacttgtataattctatgcaaatattgcttatgtaataggattattttgtaaaggtttctgtttaaaatattttaaatttgcatatcacaaccctgtggtagtatgaaatgttactgttaactttcaaacacgctatgcgtgataatttttttgtttaatgagcagatatgaagaaagcacgttaatcctggtggcttctctaggtgtcgttgtgtgcggtcctcttgtttggctgtgcgtgtgaacacgtgtgtgagttcaccatgtactgtactgtgattttttttttgtcttgttttgtttctctacactgtctgtaacctgtagtaggctctgacctagtcaggctggaagcgtcaggatatcttttcttcgtgctggtgagggctggccctaaacatccacctaatcctttcaaatcagcccggcaaaagctagactctcctcgtgtctacggcatctcttatgatcattggctgccatccaggaccccaatttgtgcttcagggggataatctccttctctcggatcattgtgatggatgctggaacctcagggtatggagctcacatcagttcatcatggtgggtgttagagaattcggtgacatgcctagtgctgagccttggctgggccatgagagtctgtatactctaaaaagcatgcagcatggtgcccctcttctgaccaacacacacacgacccctcccccaacacccccaaattcaagagtggatgtggccctgtcacaggtagaaaaacctatttagttaattctttcttggcccacagtctcccagaaatgatgttttgagtccctatagtttaaactccctctcttaaatggagcagctggttgaggctttctagatctgtttgcatcttctttaaaactaagtggtgagcatgcattgtggtgtagaggcaggcattatgtaggataagagctccggggggattcttcatgcaccagtgtttagggtacgtgcttcctaagtaaatccaaacattgtctccatcctccccgtcattagtgctctttcaatgtgatgtgggaaagcaggaggatggacacaccccactgaaagatgtaggcaggggcaggtctctcaaccaggcatatttttaaaagttgcttctgtactggttctcttcttttgctctgaggtgtgggctccctcatctcgtaaccagagaccagcacatgtcagggaagcacccagtgtcggctccccatccaaatccacaccagcaccttgttacagacaagaagtcagaggaaagggcggggtccctgcagggctgaagcctaagctactgtgaggcgctcacgagtggcagctcctgttactcccttttaaattacctgggaaatcttaacagaaaggtaatgggcccccagaaatacccacagcatagtgacctcagaccctgatactcaccacaaaacttttaagatgctgattgggagccgcttgtggctgctgggtgtgtgtgtgtgtgtgtgcgtgcgtgcgtgtgtgtgtgtctctgctggggaccctggccacccccctgctgctgtcttggtgcctgtcacccacatggtctgccatcctaacacccagctctgctcagaaaacgtcctgcgtggaggagggatgatgcagaattctgaagtcgacttccctctggctcctggcgtgccctcgctcccttcctgagcccagctcgtgttgcgccggaggctgcgcggcccctgatttctgcatggtgtagaactttctccaatagtcacattggcaaagggagaactggggtgggcggggggtggggctggcagggaattagaatttctctctctcttttaatagttttattttgtctgtcctgtttgttcatttggatgttttaatttttaaaaaaaaaaaaactttgctgatatttataattttgtatcataagaatgttttcctctacagtatttgtcatgccagtttataacaaaaaaaaatgcagggattttatttctattggaaacattacagctatgttttacttttggacagaatttttatttgtatagagtgcttactaatgttaaatagttcagagtatataacatttacattaaggactcatggtaggttttagggtaaggagtttaaaggaaataaatattcaaactgggtctcattgccaattttggtggaaatgagtttgtgtcatttcaattacaaagataaaagtatgccatataatttatttatatgaagatttatttttgtagtgtacatagtagtcatcaagtcttttgacagaagtatatttttaaagaatttatatgtgatgaatccataatgtctggaactttgctgagacatgagtgggcacagttttcattgtaaattacagcaaggaaagaaaatgtttaacagtgttaagagagtcagagcagagtggatattcatgcgattatgaagtgtttattagttaccattggcgacctagcatgcttctcatttcaaaccttggaaggtgaaaatgtacaaactctctaaataattaatgttcaaacactgatagaaattctaacatgaataaaaaataatataacttgttggttatatctttgtttgtagaatgctttttttctttaaaatacttgggagagacagttagtgttggagccatcagaaactgttgtttcatcttgctgaccttgtgacactcttcttttttgctctatctgatggagagagttttaggttttcctcctttttgttttgtataaatagtgggtataagcatagctctgttacatggatgtattacaaagtgggggctgagcttttagtgtgatcatcacccaaatagtgtacattgtacccattaattaatttcttatcacctgaccctatttttgttttctcataccaagaaacttcctaagttaaccatcaaaattagtccttctgtcatctctcttagcatacttatttcccttatgtgatgcctaataatgagggaacataaataaagccaaattcaaagataaaaaaaaaaaaaa

SEQ ID NO: 19 - DNA, 4193 bp, Homo sapiens
gaataggactagcaacttcatagacggttgtgaagacaagctagacggcagatgaaagttcttggcacagagtgaacacttgataaactatatggcagccacagcctccggagccgttgcacacctacctgcccggccgacttacctgtacttgccgccgtcccggctcacctggcggtgcccgaggagtagtcgctggagtccgcgcctccctgggactgcaatgtgccgatcttagctgctgcctgagaggatgtctggggtgtccgagcccctgagtcgagtaaagttgggcacgttacgccggcctgaaggccctgcagagcccatggtggtggtaccagtagatgtggaaaaggaggacgtgcgtatcctcaaggtctgcttctatagcaacagcttcaatcctgggaaaaacttcaaactggtcaaatgcactgtccagacggagatccgggagatcatcacctccatcctgctgagcgggcggatcgggcccaacatccggttggctgagtgctatgggctgaggctgaagcacatgaagtccgatgagatccactggctgcacccacagatgacggtgggtgaggtgcaggacaagtatgagtgtctgcacgtggaagccgagtggaggtatgaccttcaaatccgctacttgccagaagacttcatggagagcctgaaggaggacaggaccacgctgctctatttttaccaacagctccggaacgactacatgcagcgctacgccagcaaggtcagcgagggcatggccctgcagctgggctgcctggagctcaggcggttcttcaaggatatgccccacaatgcacttgacaagaagtccaacttcgagctcctagaaaaggaagtggggctggacttgtttttcccaaagcagatgcaggagaacttaaagcccaaacagttccggaagatgatccagcagaccttccagcagtacgcctcgctcagggaggaggagtgcgtcatgaagttcttcaacactctcgccggcttcgccaacatcgaccaggagacctaccgctgtgaactcattcaaggatggaacattactgtggacctggtcattggccctaaagggatccgccagctgactagtcaggacgcaaagcccacctgcctggccgagttcaagcagatcaggtccatcaggtgcctcccgctggaggagggccaggcagtacttcagctgggcattgaaggtgccccccaggccttgtccatcaaaacctcatccctagcagaggctgagaacatggctgacctcatagacggctactgccggctgcagggtgagcaccaaggctctctcatcatccatcctaggaaagatggtgagaagcggaacagcctgccccagatccccatgctaaacctggaggcccggcggtcccacctctcagagagctgcagcatagagtcagacatctacgcagagattcccgacgaaaccctgcgaaggcccggaggtccacagtatggcattgcccgtgaagatgtggtcctgaatcgtattcttggggaaggcttttttggggaggtctatgaaggtgtctacacaaatcacaaaggggagaaaatcaatgtagctgtcaagacctgcaagaaagactgcactctggacaacaaggagaagttcatgagcgaggcagtgatcatgaagaacctcgaccacccgcacatcgtgaagctgatcggcatcattgaagaggagcccacctggatcatcatggaattgtatccctatggggagctgggccactacctggagcggaacaagaactccctgaaggtgctcaccctcgtgctgtactcactgcagatatgcaaagccatggcctacctggagagcatcaactgcgtgcacagggacattgctgtccggaacatcctggtggcctcccctgagtgtgtgaagctgggggactttggtctttcccggtacattgaggacgaggactattacaaagcctctgtgactcgtctccccatcaaatggatgtccccagagtccattaacttccgacgcttcacgacagccagtgacgtctggatgttcgccgtgtgcatgtgggagatcctgagctttgggaagcagcccttcttctggctggagaacaaggatgtcatcggggtgctggagaaaggagaccggctgcccaagcctgatctctgtccaccggtcctttataccctcatgacccgctgctgggactacgaccccagtgaccggccccgcttcaccgagctggtgtgcagcctcagtgacgtttatcagatggagaaggacattgccatggagcaagagaggaatgctcgctaccgaacccccaaaatcttggagcccacagccttccaggaacccccacccaagcccagccgacctaagtacagaccccctccgcaaaccaacctcctggctccaaagctgcagttccaggttcctgagggtctgtgtgccagctctcctacgctcaccagccctatggagtatccatctcccgttaactcactgcacaccccacctctccaccggcacaatgtcttcaaacgccacagcatgcgggaggaggacttcatccaacccagcagccgagaagaggcccagcagctgtgggaggctgaaaaggtcaaaatgcggcaaatcctggacaaacagcagaagcagatggtggaggactaccagtggctcaggcaggaggagaagtccctggaccccatggtttatatgaatgataagtccccattgacgccagagaaggaggtcggctacctggagttcacagggcccccacagaagcccccgaggctgggcgcacagtccatccagcccacagctaacctggaccggactgatgacctggtgtacctcaatgtcatggagctggtgcgggccgtgctggagctcaagaatgagctctgtcagctgccccccgagggctacgtggtggtggtgaagaatgtggggctgaccctgcggaagctcatcgggagcgtggatgatctcctgccttccttgccgtcatcttcacggacagagatcgagggcacccagaaactgctcaacaaagacctggcagagctcatcaacaagatgcggctggcacagcagaacgccgtgacctccctaagtgaggagtgcaagaggcagatgctgacggcttcacacaccctggctgtggacgccaagaacctgctcgacgctgtggaccaggccaaggttctggccaatctggcccacccacctgcagagtgacggagggtgggggccacctgcctgcgtcttccgcccctgcctgccatgtacctcccctgccttgctgttggtcatgtgggtcttccagggggaaggccaaggggagtcaccttcccttgccactttgcacgacgccctctccccacccctacccctggctgtactgctcaggctgcagctggacagaggggactctgggctatggacacagggtgacggtgacaaagatggctcagagggggactgctgctgcctggccactgctccctaagccagcctggtccatgcagggggctcctgggggtggggaggtgtcacatggtgcccctagctttatatatggacatggcaggccgatttgggaaccaagctattcctttcccttcctcttcggccctcagatgtcccttgatgcacagagaagctggggaggagctttgttttgggggtcaggcagccagtgagatgagggatgggcctggcattcttgtacagtgtatattgaaatttatttaatgtgagtttggtctggactgacagcatgtgccctcctgagggaggacctggggcacagtccaggaacaagctaattgggagtccaggcacaggatgctgtgttgtcaacaaaccaagcatcagggggaagaagcagagagatgcggccaagataggaccttgggccaaatccgctctcttcctgcccctctttctctttcttcctttactttcccttgcttttccctcttttcttactcctcctctttctctccccaacccccattctcatctgcacccttcttttctcatgtgtttgcataaacattcttttaacttctttctatttgacttgtggttgaattaaaattgtcccatttgctttgcaaaaaaaaaaaaaaaaaaaaaaaaaaaa

SEQ ID NO: 20 - DNA, 3769 bp, Homo sapiens
gctgtgtgcgcctgcgcggggcgccgagacagggcgtgttcgctgttcagtgccggtgttgcagggagtgagggcagctggagtgcgttctgccgaagcttgtggttgcacgcccatcgtcttaggggctaccttccgtgaccatgtccaagtctctgaagaagttggtggaggagagccgggagaagaaccagcccgaggtggacatgagtgaccggggcatctccaacatgctggatgtcaacggcctctttaccttatcccatatcacacaactggtcctcagccataacaagctaacaatggtgccaccgaacatcgcagaactgaagaatttggaggtgctcaacttttttaataaccaaatcgaggagctgcccacacagatcagtagccttcagaaactcaaacacctgaaccttggcatgaacaggctgaacactttgccacgaggcttcggctccctgccagctcttgaggttctggacttgacgtacaacaacttgagcgaaaattctcttcctggaaacttcttctacctgaccaccctgcgtgcactctatctaagtgacaacgattttgaaatcctgccgccagatattgggaagctcacaaagttgcagatactcagccttagggataacgacctgatctcgctgcctaaggaaatcggggagcttacccagcttaaagagctccacattcaggggaaccgcctcaccgttctgcccccagaactaggaaacttggatttaactggccagaagcaggtattcaaagcagagaacaatccctgggtgacccccattgcagaccagttccagcttggcgtgtcccatgtttttgagtatatccgttctgagacatacaaatacctctacggcagacacatgcaggccaacccagaaccaccgaagaagaataatgacaaatcgaaaaagatcagccggaaacccctggcagccaagaacagataaggaagggattggcatcggctggccttccagcaccttctctctccaacacttcattctctcttgccctgtctctcaaataaacccaatgctgcgtgtgaggccttttttatttttcttttcactctctttctaatgcttcccaccttaccttttagattcttttgctaggtgggagattgttataaggtctttaaaccatttccatttgtttctttaacattaccaaaagcagggaacaaagctcttattcaactgcgaattccatagtgggctctggcttttcttgaatagatatcacaaggttgcttattatcaaaagaataattaaaatcatgtaaccatttaaatgtcactgttaacacttttcactctttctgttgattcacctaactcattattttgctttattaaaagtcttccttcaccaccgagatatgctaatttaacttacaaatgattttaataaaatcttgagtttgtatcacatgttacttattgactcagaataaaagaacagtctgatcttggggtataacacattttcatttacttttctcccccaaaatcatcttatccaattttattggttatacatgataaacttttcatgaaagaaatgcaaaattaaatcacagttcgtttcttctcacattaatttgtcaagttttttttttctttgaagactttctaaattaggaagcagaaaaacaaatctctaggagattctgccaaaggattttggaaagtagcattccttcgccgaagaaatggtgatttctgccaggggctggtagacaagaactgtgaaagagagagagaaaaaacctcaactgtgtattttgtcacggcggaaaatctgctcgcatcgaagcattcttctaagcgacttcgatgccaaggaagttgtgtaaatgtgcacgcgctacaccacacccagggtggaaaccacagttgcagagtcattaaacaatcaattgtttgtttaacatctgtgataggcagctttccttcttttcaacagtgatacctacgaaaatcaaaataaatgcaagctgaggttttgtgctcactgaaagggctgtcaaccccagaaggccgacacaaaaaaaatggtatgtgaagatgcaccgtcttttcaaatggcctgggagagtcaaatggcctgggagagggggcctgcccttctctgctgtgtcctttcggcttcccagttgagctcccaagaccaggacccactggggcatataaaatctctgctgtatcctttcggcttcccagttgagctcccaagaccaggacccactggggcatataaaaaagtcaaaaatcaaaatcaaacaacaagttctgagttacttaggaaacagacttcgcatttcaatcagagaggccacagagcaaggtctaaacttctggcttctagacaaattcctgatagaacatttaaatgtgggaagtggcttccccaggtcccatcccctgtttagggatagagttgatatcatttttataggtgccatgtatgcctctgcctgaatttttttaattgacttttgagcttttgagattgcacgagggagaacaaggcctttgctgttgtggataggaaagacttaacctaaaattaaaccagcaagaaagcattagtaaaaatctaacaatatgaagggctcttatgagtcatttttttcaaaagatgaaaactccagaaacgcacaggaacgaaatacctcccagaaacatgaagcaatcatcgaagactcactggtaatatttttaaaaagtatacagatcaaagcaaaaagaagccatgtgtaacaaagagaaatgtgcaaatattttttaaggcagtattaagtgcaagaggagtaacatgaaataaacattctttcacatggctactgggaatataaatttcgctccagaaaggccgtagcagtttgacgataggtggcaaaaccttaagattgtgtactggggcccagaatttttatttctaggaatgtatcctgaggaaattatccgagatccccacaaactgcaatgtttaggaattgtccttatagcattgcatacacaagaaaaacagagaaaagcctgatccctgtcagtggaaaaggggttcaatgaattacggtgtgtctgcatgaggcttttatgacattaaaaattgttgaacaacggccaggcacagtggctcatgcctgtaatcctaacactttgggaggccaaggtgggaagattgcctgagctcaggagtttgagaccagcctgggcaacacggtgaaaccccgtctctactaaaatacaaaaaattagccgggcgtcgcagcatgcgcctgtagtcccagctgctcaggaggctgaggcaggagaattgattgaacccgggaggcagaggttgcactgagctgagattaagccaccgcactccagcctgggcgacagagcaagattccgttcccaagaaaaaaaaattgttcaacaataagggcaaagggagagaatcataacatctgattaaacagaaaaagcaagatttttaaaactaactatataaggatggtcccagctgtgtcaaaaggaagcttgtttgtaatacgtgtgcataaaaattaaatagaggtgaacacaattattttaaggcagttaaattatctctgtattgtgaactaagactttctagaattttacttattcattctgtacttaaattttttctaatgaacacatatacttttgtaatcagaaaatattaaatgcatgtatttttcaaaaaaaaaaaaaaaaaa

SEQ ID NO: 21 - DNA, 8606 bp, Homo sapiens
aaattcgccaactgaaaaagtgggaaaggatgtctggaggcgaggcgtcccattacagaggaaggagctcgctatataagccagccaaagttggctgcaccggccacagcctgcctactgtcacccgcctctcccgcgcgcagatacacgcccccgcctccgtgggcacaaaggcagcgctgctggggaactcgggggaacgcgcacgtgggaaccgccgcagctccacactccaggtacttcttccaaggacctaggtctctcgcccatcggaaagaaaataattctttcaagaagatcagggacaactgatttgaagtctactctgtgcttctaaatccccaattctgctgaaagtgagataccctagagccctagagccccagcagcacccagccaaacccacctccaccatgggggccatgactcagctgttggcaggtgtctttcttgctttccttgccctcgctaccgaaggtggggtcctcaagaaagtcatccggcacaagcgacagagtggggtgaacgccaccctgccagaagagaaccagccagtggtgtttaaccacgtttacaacatcaagctgccagtgggatcccagtgttcggtggatctggagtcagccagtggggagaaagacctggcaccgccttcagagcccagcgaaagctttcaggagcacacagtggatggggaaaaccagattgtcttcacacatcgcatcaacatcccccgccgggcctgtggctgtgccgcagcccctgatgttaaggagctgctgagcagactggaggagctggagaacctggtgtcttccctgagggagcaatgtactgcaggagcaggctgctgtctccagcctgccacaggccgcttggacaccaggcccttctgtagcggtcggggcaacttcagcactgaaggatgtggctgtgtctgcgaacctggctggaaaggccccaactgctctgagcccgaatgtccaggcaactgtcaccttcgaggccggtgcattgatgggcagtgcatctgtgacgacggcttcacgggcgaggactgcagccagctggcttgccccagcgactgcaatgaccagggcaagtgcgtaaatggagtctgcatctgtttcgaaggctacgccggggctgactgcagccgtgaaatctgcccagtgccctgcagtgaggagcacggcacatgtgtagatggcttgtgtgtgtgccacgatggctttgcaggcgatgactgcaacaagcctctgtgtctcaacaattgctacaaccgtggacgatgcgtggagaatgagtgcgtgtgtgatgagggtttcacgggcgaagactgcagtgagctcatctgccccaatgactgcttcgaccggggccgctgcatcaatggcacctgctactgcgaagaaggcttcacaggtgaagactgcgggaaacccacctgcccacatgcctgccacacccagggccggtgtgaggaggggcagtgtgtatgtgatgagggctttgccggtgtggactgcagcgagaagaggtgtcctgctgactgtcacaatcgtggccgctgtgtagacgggcggtgtgagtgtgatgatggtttcactggagctgactgtggggagctcaagtgtcccaatggctgcagtggccatggccgctgtgtcaatgggcagtgtgtgtgtgatgagggctatactggggaggactgcagccagctacggtgccccaatgactgtcacagtcggggccgctgtgtcgagggcaaatgtgtatgtgagcaaggcttcaagggctatgactgcagtgacatgagctgccctaatgactgtcaccagcacggccgctgtgtgaatggcatgtgtgtttgtgatgacggctacacaggggaagactgccgggatcgccaatgccccagggactgcagcaacaggggcctctgtgtggacggacagtgcgtctgtgaggacggcttcaccggccctgactgtgcagaactctcctgtccaaatgactgccatggccagggtcgctgtgtgaatgggcagtgcgtgtgccatgaaggatttatgggcaaagactgcaaggagcaaagatgtcccagtgactgtcatggccagggccgctgcgtggacggccagtgcatctgccacgagggcttcacaggcctggactgtggccagcactcctgccccagtgactgcaacaacttaggacaatgcgtctcgggccgctgcatctgcaacgagggctacagcggagaagactgctcagaggtgtctcctcccaaagacctcgttgtgacagaagtgacggaagagacggtcaacctggcctgggacaatgagatgcgggtcacagagtaccttgtcgtgtacacgcccacccacgagggtggtctggaaatgcagttccgtgtgcctggggaccagacgtccaccatcatccaggagctggagcctggtgtggagtactttatccgtgtatttgccatcctggagaacaagaagagcattcctgtcagcgccagggtggccacgtacttacctgcacctgaaggcctgaaattcaagtccatcaaggagacatctgtggaagtggagtgggatcctctagacattgcttttgaaacctgggagatcatcttccggaatatgaataaagaagatgagggagagatcaccaaaagcctgaggaggccagagacctcttaccggcaaactggtctagctcctgggcaagagtatgagatatctctgcacatagtgaaaaacaatacccggggccctggcctgaagagggtgaccaccacacgcttggatgcccccagccagatcgaggtgaaagatgtcacagacaccactgccttgatcacctggttcaagcccctggctgagatcgatggcattgagctgacctacggcatcaaagacgtgccaggagaccgtaccaccatcgatctcacagaggacgagaaccagtactccatcgggaacctgaagcctgacactgagtacgaggtgtccctcatctcccgcagaggtgacatgtcaagcaacccagccaaagagaccttcacaacaggcctcgatgctcccaggaatcttcgacgtgtttcccagacagataacagcatcaccctggaatggaggaatggcaaggcagctattgacagttacagaattaagtatgcccccatctctggaggggaccacgctgaggttgatgttccaaagagccaacaagccacaaccaaaaccacactcacaggtctgaggccgggaactgaatatgggattggagtttctgctgtgaaggaagacaaggagagcaatccagcgaccatcaacgcagccacagagttggacacgcccaaggaccttcaggtttctgaaactgcagagaccagcctgaccctgctctggaagacaccgttggccaaatttgaccgctaccgcctcaattacagtctccccacaggccagtgggtgggagtgcagcttccaagaaacaccacttcctatgtcctgagaggcctggaaccaggacaggagtacaatgtcctcctgacagccgagaaaggcagacacaagagcaagcccgcacgtgtgaaggcatccactgaacaagcccctgagctggaaaacctcaccgtgactgaggttggctgggatggcctcagactcaactggaccgcagctgaccaggcctatgagcactttatcattcaggtgcaggaggccaacaaggtggaggcagctcggaacctcaccgtgcctggcagccttcgggctgtggacataccgggcctcaaggctgctacgccttatacagtctccatctatggggtgatccagggctatagaacaccagtgctctctgctgaggcctccacaggggaaactcccaatttgggagaggtcgtggtggccgaggtgggctgggatgccctcaaactcaactggactgctccagaaggggcctatgagtactttttcattcaggtgcaggaggctgacacagtagaggcagcccagaacctcaccgtcccaggaggactgaggtccacagacctgcctgggctcaaagcagccactcattataccatcaccatccgcggggtcactcaggacttcagcacaacccctctctctgttgaagtcttgacagaggaggttccagatatgggaaacctcacagtgaccgaggttagctgggatgctctcagactgaactggaccacgccagatggaacctatgaccagtttactattcaggtccaggaggctgaccaggtggaagaggctcacaatctcacggttcctggcagcctgcgttccatggaaatcccaggcctcagggctggcactccttacacagtcaccctgcacggcgaggtcaggggccacagcactcgaccccttgctgtagaggtcgtcacagaggatctcccacagctgggagatttagccgtgtctgaggttggctgggatggcctcagactcaactggaccgcagctgacaatgcctatgagcactttgtcattcaggtgcaggaggtcaacaaagtggaggcagcccagaacctcacgttgcctggcagcctcagggctgtggacatcccgggcctcgaggctgccacgccttatagagtctccatctatggggtgatccggggctatagaacaccagtactctctgctgaggcctccacagccaaagaacctgaaattggaaacttaaatgtttctgacataactcccgagagcttcaatctctcctggatggctaccgatgggatcttcgagacctttaccattgaaattattgattccaataggttgctggagactgtggaatataatatctctggtgctgaacgaactgcccatatctcagggctaccccctagtactgattttattgtctacctctctggacttgctcccagcatccggaccaaaaccatcagtgccacagccacgacagaggccctgccccttctggaaaacctaaccatttccgacattaatccctacgggttcacagtttcctggatggcatcggagaatgcctttgacagctttctagtaacggtggtggattctgggaagctgctggacccccaggaattcacactttcaggaacccagaggaagctggagcttagaggcctcataactggcattggctatgaggttatggtctctggcttcacccaagggcatcaaaccaagcccttgagggctgagattgttacagaagccgaaccggaagttgacaaccttctggtttcagatgccaccccagacggtttccgtctgtcctggacagctgatgaaggggtcttcgacaattttgttctcaaaatcagagataccaaaaagcagtctgagccactggaaataaccctacttgcccccgaacgtaccagggacataacaggtctcagagaggctactgaatacgaaattgaactctatggaataagcaaaggaaggcgatcccagacagtcagtgctatagcaacaacagccatgggctccccaaaggaagtcattttctcagacatcactgaaaattcggctactgtcagctggagggcacccacagcccaagtggagagcttccggattacctatgtgcccattacaggaggtacaccctccatggtaactgtggacggaaccaagactcagaccaggctggtgaaactcatacctggcgtggagtaccttgtcagcatcatcgccatgaagggctttgaggaaagtgaacctgtctcagggtcattcaccacagctctggatggcccatctggcctggtgacagccaacatcactgactcagaagccttggccaggtggcagccagccattgccactgtggacagttatgtcatctcctacacaggcgagaaagtgccagaaattacacgcacggtgtccgggaacacagtggagtatgctctgaccgacctcgagcctgccacggaatacacactgagaatctttgcagagaaagggccccagaagagctcaaccatcactgccaagttcacaacagacctcgattctccaagagacttgactgctactgaggttcagtcggaaactgccctccttacctggcgacccccccgggcatcagtcaccggttacctgctggtctatgaatcagtggatggcacagtcaaggaagtcattgtgggtccagataccacctcctacagcctggcagacctgagcccatccacccactacacagccaagatccaggcactcaatgggcccctgaggagcaatatgatccagaccatcttcaccacaattggactcctgtaccccttccccaaggactgctcccaagcaatgctgaatggagacacgacctctggcctctacaccatttatctgaatggtgataaggctgaggcgctggaagtcttctgtgacatgacctctgatgggggtggatggattgtgttcctgagacgcaaaaacggacgcgagaacttctaccaaaactggaaggcatatgctgctggatttggggaccgcagagaagaattctggcttgggctggacaacctgaacaaaatcacagcccaggggcagtacgagctccgggtggacctgcgggaccatggggagacagcctttgctgtctatgacaagttcagcgtgggagatgccaagactcgctacaagctgaaggtggaggggtacagtgggacagcaggtgactccatggcctaccacaatggcagatccttctccacctttgacaaggacacagattcagccatcaccaactgtgctctgtcctacaaaggggctttctggtacaggaactgtcaccgtgtcaacctgatggggagatatggggacaataaccacagtcagggcgttaactggttccactggaagggccacgaacactcaatccagtttgctgagatgaagctgagaccaagcaacttcagaaatcttgaaggcaggcgcaaacgggcataaattccagggaccactgggtgagagaggaataaggcccagagcgaggaaaggattttaccaaagcatcaatacaaccagcccaaccatcggtccacacctgggcatttggtgagagtcaaagctgaccatggatccctggggccaacggcaacagcatgggcctcacctcctctgtgatttctttctttgcaccaaagacatcagtctccaacatgtttctgttttgttgtttgattcagcaaaaatctcccagtgacaacatcgcaatagttttttacttctcttaggtggctctgggaatgggagaggggtaggatgtacaggggtagtttgttttagaaccagccgtattttacatgaagctgtataattaattgtcattatttttgttagcaaagattaaatgtgtcattggaagccatccctttttttacatttcatacaacagaaaccagaaaagcaatactgtttccattttaaggatatgattaatattattaatataataatgatgatgatgatgatgaaaactaaggatttttcaagagatctttctttccaaaacatttctggacagtacctgattgtattttttttttaaataaaagcacaagtacttttgagtttgttattttgctttgaattgttgagtctgaatttcaccaaagccaatcatttgaacaaagcggggaatgttgggataggaaaggtaagtagggatagtggtcaagtgggaggggtggaaaggagactaaagactgggagagagggaagcactttttttaaataaagttgaacacacttgggaaaagcttacaggccaggcctgtaatcccaacactttgggaggccaaggtgggaggatagcttaaccccaggagtttgagaccagcctgagcaacatagtgagaacttgtctctacagaaaaaaaaaaaaaaaaaaatttaattaggcaagcgtggtagtgcgcacctgtcgtcccagctactcaggaggctgaggtaggaaaatcactggagcccaggagttagaggttacagtgagctatgatcacactactgcactccagcctgggcaacagagggagaccctgtctctaaataaaaaaagaaaagaaaaaaaaagcttacaacttgagattcagcatcttgctcagtatttccaagactaatagattatggtttaaaagatgcttttatactcattttctaatgcaactcctagaaactctatgatatagttgaggtaagtattgttaccacacatgggctaagatccccagaggcagactgcctgagttcaattcttggctccaccattcccaagttccctaacctctctatgcctcagtttcctcttctgtaaagtagggacactcatacttctcatttcagaacatttttgtgaagaataaattatgttatccatttgaggcccttagaatggtacccggtgtatattaagtgctagtacatgttagctatcatcattatcactttatatgagatggactggggttcatagaaacccaatgacttgattgtggctactactcaataaataatagaatttggatttaaaaaaaa

SEQ ID NO: 22 - DNA, 6623 bp, Homo sapiens
gcggccgctgcgtccgccagtagcgggttgcaggcgcaccctcccctccagggcggccacgcagctgtcagtgccgccgccactgcgaggctggagcggagcccgggtggccgagggaggggaccccgcgagagggccgcgcgccggccgccgccgccccggcgcccaggctcggtgctggagagtcatgcctgtgagccctgggcacctcctgatgtcctgcgaggtcacggtgttcccaaacctcagggttgccctgccccactccagaggctctcaggccccaccccggagccctctgtgcggagccgcctcctcctggccagttccccagtagtcctgaagggagacctgctgtgtggagcctcttctgggacccagccatgagtgtggagctgagcaactgaacctgaaactcttccactgtgagtcaaggaggcttttccgcacatgaaggacgctgagcgggaaggactcctctctgcctgcagttgtagcgagtggaccagcaccaggggctctctagactgcccctcctccatcgccttccctgcctctccaggacagagcagccacgtctgcacacctcgccctctttacactcagttttcagagcacgtttctcctatttcctgcgggttgcagcgcctacttgaacttactcagaccacctacttctctagcagcactgggcgtccctttcagcaagacgatggctgtgctcaggcagctggcgctcctcctctggaagaactacaccctgcagaagcggaaggtcctggtgacggtcctggaactcttcctgccattgctgttttctgggatcctcatctggctccgcttgaagattcagtcggaaaatgtgcccaacgccaccatctacccgggccagtccatccaggagctgcctctgttcttcaccttccctccgccaggagacacctgggagcttgcctacatcccttctcacagtgacgctgccaagaccgtcactgagacagtgcgcagggcacttgtgatcaacatgcgagtgcgcggctttccctccgagaaggactttgaggactacattaggtacgacaactgctcgtccagcgtgctggccgccgtggtcttcgagcaccccttcaaccacagcaaggagcccctgccgctggcggtgaaatatcacctacggttcagttacacacggagaaattacatgtggacccaaacaggctcctttttcctgaaagagacagaaggctggcacactacttcccttttcccgcttttcccaaacccaggaccaagggaacctacatcccctgatggcggagaacctgggtacatccgggaaggcttcctggccgtgcagcatgctgtggaccgggccatcatggagtaccatgccgatgccgccacacgccagctgttccagagactgacggtgaccatcaagaggttcccgtacccgccgttcatcgcagaccccttcctcgtggccatccagtaccagctgcccctgctgctgctgctcagcttcacctacaccgcgctcaccattgcccgtgctgtcgtgcaggagaaggaaaggaggctgaaggagtacatgcgcatgatggggctcagcagctggctgcactggagtgcctggttcctcttgttcttcctcttcctcctcatcgccgcctccttcatgaccctgctcttctgtgtcaaggtgaagccaaatgtagccgtgctgtcccgcagcgacccctccctggtgctcgccttcctgctgtgcttcgccatctctaccatctccttcagcttcatggtcagcaccttcttcagcaaagccaacatggcagcagccttcggaggcttcctctacttcttcacctacatcccctacttcttcgtggcccctcggtacaactggatgactctgagccagaagctctgctcctgcctcctgtctaatgtcgccatggcaatgggagcccagctcattgggaaatttgaggcgaaaggcatgggcatccagtggcgagacctcctgagtcccgtcaacgtggacgacgacttctgcttcgggcaggtgctggggatgctgctgctggactctgtgctctatggcctggtgacctggtacatggaggccgtcttcccagggcagttcggcgtgcctcagccctggtacttcttcatcatgccctcctattggtgtgggaagccaagggcggttgcagggaaggaggaagaagacagtgaccccgagaaagcactcagaaacgagtactttgaagccgagccagaggacctggtggcggggatcaagatcaagcacctgtccaaggtgttcagggtgggaaataaggacagggcggccgtcagagacctgaacctcaacctgtacgagggacagatcaccgtcctgctgggccacaacggtgccgggaagaccaccaccctctccatgctcacaggtctctttccccccaccagtggacgggcatacatcagcgggtatgaaatttcccaggacatggttcagatccggaagagcctgggcctgtgcccgcagcacgacatcctgtttgacaacttgacagtcgcagagcacctttatttctacgcccagctgaagggcctgtcacgtcagaagtgccctgaagaagtcaagcagatgctgcacatcatcggcctggaggacaagtggaactcacggagccgcttcctgagcgggggcatgaggcgcaagctctccatcggcatcgccctcatcgcaggctccaaggtgctgatactggacgagcccacctcgggcatggacgccatctccaggagggccatctgggatcttcttcagcggcagaaaagtgaccgcaccatcgtgctgaccacccacttcatggacgaggctgacctgctgggagaccgcatcgccatcatggccaagggggagctgcagtgctgcgggtcctcgctgttcctcaagcagaaatacggtgccggctatcacatgacgctggtgaaggagccgcactgcaacccggaagacatctcccagctggtccaccaccacgtgcccaacgccacgctggagagcagcgctggggccgagctgtctttcatccttcccagagagagcacgcacaggtttgaaggtctctttgctaaactggagaagaagcagaaagagctgggcattgccagctttggggcatccatcaccaccatggaggaagtcttccttcgggtcgggaagctggtggacagcagtatggacatccaggccatccagctccctgccctgcagtaccagcacgagaggcgcgccagcgactgggctgtggacagcaacctctgtggggccatggacccctccgacggcattggagccctcatcgaggaggagcgcaccgctgtcaagctcaacactgggctcgccctgcactgccagcaattctgggccatgttcctgaagaaggccgcatacagctggcgcgagtggaaaatggtggcggcacaggtcctggtgcctctgacctgcgtcaccctggccctcctggccatcaactactcctcggagctcttcgacgaccccatgctgaggctgaccttgggcgagtacggcagaaccgtcgtgcccttctcagttcccgggacctcccagctgggtcagcagctgtcagagcatctgaaagacgcactgcaggctgagggacaggagccccgcgaggtgctcggtgacctggaggagttcttgatcttcagggcttctgtggaggggggcggctttaatgagcggtgccttgtggcagcgtccttcagagatgtgggagagcgcacggtcgtcaacgccttgttcaacaaccaggcgtaccactctccagccactgccctggccgtcgtggacaaccttctgttcaagctgctgtgcgggcctcacgcctccattgtggtctccaacttcccccagccccggagcgccctgcaggctgccaaggaccagtttaacgagggccggaagggattcgacattgccctcaacctgctcttcgccatggcattcttggccagcacgttctccatcctggcggtcagcgagagggccgtgcaggccaagcatgtgcagtttgtgagtggagtccacgtggccagtttctggctctctgctctgctgtgggacctcatctccttcctcatccccagtctgctgctgctggtggtgtttaaggccttcgacgtgcgtgccttcacgcgggacggccacatggctgacaccctgctgctgctcctgctctacggctgggccatcatccccctcatgtacctgatgaacttcttcttcttgggggcggccactgcctacacgaggctgaccatcttcaacatcctgtcaggcatcgccaccttcctgatggtcaccatcatgcgcatcccagctgtaaaactggaagaactttccaaaaccctggatcacgtgttcctggtgctgcccaaccactgtctggggatggcagtcagcagtttctacgagaactacgagacgcggaggtactgcacctcctccgaggtcgccgcccactactgcaagaaatataacatccagtaccaggagaacttctatgcctggagcgccccgggggtcggccggtttgtggcctccatggccgcctcagggtgcgcctacctcatcctgctcttcctcatcgagaccaacctgcttcagagactcaggggcatcctctgcgccctccggaggaggcggacactgacagaattatacacccggatgcctgtgcttcctgaggaccaagatgtagcggacgagaggacccgcatcctggcccccagcccggactccctgctccacacacctctgattatcaaggagctctccaaggtgtacgagcagcgggtgcccctcctggccgtggacaggctctccctcgcggtgcagaaaggggagtgcttcggcctgctgggcttcaatggagccgggaagaccacgactttcaaaatgctgaccggggaggagagcctcacttctggggatgcctttgtcgggggtcacagaatcagctctgatgtcggaaaggtgcggcagcggatcggctactgcccgcagtttgatgccttgctggaccacatgacaggccgggagatgctggtcatgtacgctcggctccggggcatccctgagcgccacatcggggcctgcgtggagaacactctgcggggcctgctgctggagccacatgccaacaagctggtcaggacgtacagtggtggtaacaagcggaagctgagcaccggcatcgccctgatcggagagcctgctgtcatcttcctggacgagccgtccactggcatggaccccgtggcccggcgcctgctttgggacaccgtggcacgagcccgagagtctggcaaggccatcatcatcacctcccacagcatggaggagtgtgaggccctgtgcacccggctggccatcatggtgcaggggcagttcaagtgcctgggcagcccccagcacctcaagagcaagttcggcagcggctactccctgcgggccaaggtgcagagtgaagggcaacaggaggcgctggaggagttcaaggccttcgtggacctgacctttccaggcagcgtcctggaagatgagcaccaaggcatggtccattaccacctgccgggccgtgacctcagctgggcgaaggttttcggtattctggagaaagccaaggaaaagtacggcgtggacgactactccgtgagccagatctcgctggaacaggtcttcctgagcttcgcccacctgcagccgcccaccgcagaggaggggcgatgaggggtggcggctgtctcgccatcaggcagggacaggacgggcaagcagggcccatcttacatcctctctctccaagtttatctcatcctttatttttaatcacttttttctatgatggatatgaaaaattcaaggcagtatgcacagaatggacgagtgcagcccagccctcatgcccaggatcagcatgcgcatctccatgtctgcatactctggagttcactttcccagagctggggcaggccgggcagtctgcgggcaagctccggggtctctgggtggagagctgacccaggaagggctgcagctgagctgggggttgaatttctccaggcactccctggagagaggacccagtgacttgtccaagtttacacacgacactaatctcccctggggaggaagcgggaagccagccaggttgaactgtagcgaggcccccaggccgccaggaatggaccatgcagatcactgtcagtggagggaagctgctgactgtgattaggtgctggggtcttagcgtccagcgcagcccgggggcatcctggaggctctgctccttagggcatggtagtcaccgcgaagccgggcaccgtcccacagcatctcctagaagcagccggcacaggagggaaggtggccaggctcgaagcagtctctgtttccagcactgcaccctcaggaagtcgcccgccccaggacacgcagggaccaccctaagggctgggtggctgtctcaaggacacattgaatacgttgtgaccatccagaaaataaatgctgaggggacacagtc

SEQ ID NO: 23 - DNA, 2882 bp, Homo sapiens
ggggcctggtggccgcgcggcgctgctgggttctccgaggcgacctggccgccggccgctcctccgcgcgctgttccgcacttgctgccctcgcccggcccggagcgccgctgccatgcggctggcgctgctctgggccctggggctcctgggcgcgggcagccctctgccttcctggccgctcccaaatatagtactgtcttggggtgtcctgggacctgcaggtggcactgaggagcagcaggcagagtcagagaaggccccgagggagcccttggagccccaggtccttcaggacgatctcccaattagcctcaaaaaggtgcttcagaccagtctgcctgagcccctgaggatcaagttggagctggacggtgacagtcatatcctggagctgctacagaatagggagttggtcccaggccgcccaaccctggtgtggtaccagcccgatggcactcgggtggtcagtgagggacacactttggagaactgctgctaccagggaagagtgcggggatatgcaggctcctgggtgtccatctgcacctgctctgggctcagaggcttggtggtcctgaccccagagagaagctataccctggagcaggggcctggggaccttcagggtcctcccattatttcgcgaatccaagatctccacctgccaggccacacctgtgccctgagctggcgggaatctgtacacactcagaagccaccagagcaccccctgggacagcgccacattcgccggaggcgggatgtggtaacagagaccaagactgtggagttggtgattgtggctgatcactcggaggcccagaaataccgggacttccagcacctgctaaaccgcacactggaagtggccctcttgctggacacattcttccggcccctgaatgtacgagtggcactagtgggcctggaggcctggacccagcgtgacctggtggagatcagcccaaacccagctgtcaccctcgaaaacttcctccactggcgcagggcacatttgctgcctcgattgccccatgacagtgcccagctggtgactggtacttcattctctgggcctacggtgggcatggccattcagaactccatctgttctcctgacttctcaggaggtgtgaacatggaccactccaccagcatcctgggagtcgcctcctccatagcccatgagttgggccacagcctgggcctggaccatgatttgcctgggaatagctgcccctgtccaggtccagccccagccaagacctgcatcatggaggcctccacagacttcctaccaggcctgaacttcagcaactgcagccgacgggccctggagaaagccctcctggatggaatgggcagctgcctcttcgaacggctgcctagcctaccccctatggctgctttctgcggaaatatgtttgtggagccgggcgagcagtgtgactgtggcttcctggatgactgcgtcgatccctgctgtgattctttgacctgccagctgaggccaggtgcacagtgtgcatctgacggaccctgttgtcaaaattgccagctgcgcccgtctggctggcagtgtcgtcctaccagaggggattgtgacttgcctgaattctgcccaggagacagctcccagtgtccccctgatgtcagcctaggggatggcgagccctgcgctggcgggcaagctgtgtgcatgcacgggcgttgtgcctcctatgcccagcagtgccagtcactttggggacctggagcccagcccgctgcgccactttgcctccagacagctaatactcggggaaatgcttttgggagctgtgggcgcaaccccagtggcagttatgtgtcctgcacccctagagatgccatttgtgggcagctccagtgccagacaggtaggacccagcctctgctgggctccatccgggatctactctgggagacaatagatgtgaatgggactgagctgaactgcagctgggtgcacctggacctgggcagtgatgtggcccagcccctcctgactctgcctggcacagcctgtggccctggcctggtgtgtatagaccatcgatgccagcgtgtggatctcctgggggcacaggaatgtcgaagcaaatgccatggacatggggtctgtgacagcaacaggcactgctactgtgaggagggctgggcaccccctgactgcaccactcagctcaaagcaaccagctccctgaccacagggctgctcctcagcctcctggtcttattggtcctggtgatgcttggtgccagctactggtaccgtgcccgcctgcaccagcgactctgccagctcaagggacccacctgccagtacagggcagcccaatctggtccctctgaacggccaggacctccgcagagggccctgctggcacgaggcactaagtctcaggggccagccaagcccccacccccaaggaagccactgcctgccgacccccagggccggtgcccatcgggtgacctgcccggcccaggggctggaatcccgcccctagtggtaccctccagaccagcgccaccgcctccgacagtgtcctcgctctacctctgacctctccggaggttccgctgcctccaagccggacttagggcttcaagaggcgggcgtgccctctggagtcccctaccatgactgaaggcgccagagactggcggtgtcttaagactccgggcaccgccacgcgctgtcaagcaacactctgcggacctgccggcgtagttgcagcgggggcttggggaggggctgggggttggacgggattgaggaaggtccgcacagcctgtctctgctcagttgcaataaacgtgacatcttgggagcgttcaaaaaaaaaaaaaaaaaa

SEQ ID NO: 24 - DNA, 6267 bp, Homo sapiens
agctgcaagtggcgggcgcccaggcagatgcgatccagcggctctgggggcggcagcggtggtagcagctggtacctcccgccgcctctgttcggagggtcgcggggcaccgaggtgctttccggccgccctctggtcggccacccaaagccgcgggcgctgatgatgggtgaggagggggcggcaagatttcgggcgcccctgccctgaacgccctcagctgctgccgccggggccgctccagtgcctgcgaactctgaggagccgaggcgccggtgagagcaaggacgctgcaaacttgcgcagcgcgggggctgggattcacgcccagaagttcagcaggcagacagtccgaagccttcccgcagcggagagatagcttgagggtgcgcaagacggcagcctccgccctcggttcccgcccagaccgggcagaagagcttggaggagccaaaaggaacgcaaaaggcggccaggacagcgtgcagcagctgggagccgccgttctcagccttaaaagttgcagagattggaggctgccccgagaggggacagaccccagctccgactgcggggggcaggagaggacggtacccaactgccacctcccttcaaccatagtagttcctctgtaccgagcgcagcgagctacagacgggggcgcggcactcggcgcggagagcgggaggctcaaggtcccagccagtgagcccagtgtgcttgagtgtctctggactcgcccctgagcttccaggtctgtttcatttagactcctgctcgcctccgtgcagttgggggaaagcaagagacttgcgcgcacgcacagtcctctggagatcaggtggaaggagccgctgggtaccaaggactgttcagagcctcttcccatctcggggagagcgaagggtgaggctgggcccggagagcagtgtaaacggcctcctccggcgggatgggagccatcgggctcctgtggctcctgccgctgctgctttccacggcagctgtgggctccgggatggggaccggccagcgcgcgggctccccagctgcggggccgccgctgcagccccgggagccactcagctactcgcgcctgcagaggaagagtctggcagttgacttcgtggtgccctcgctcttccgtgtctacgcccgggacctactgctgccaccatcctcctcggagctgaaggctggcaggcccgaggcccgcggctcgctagctctggactgcgccccgctgctcaggttgctggggccggcgccgggggtctcctggaccgccggttcaccagccccggcagaggcccggacgctgtccagggtgctgaagggcggctccgtgcgcaagctccggcgtgccaagcagttggtgctggagctgggcgaggaggcgatcttggagggttgcgtcgggccccccggggaggcggctgtggggctgctccagttcaatctcagcgagctgttcagttggtggattcgccaaggcgaagggcgactgaggatccgcctgatgcccgagaagaaggcgtcggaagtgggcagagagggaaggctgtccgcggcaattcgcgcctcccagccccgccttctcttccagatcttcgggactggtcatagctccttggaatcaccaacaaacatgccttctccttctcctgattattttacatggaatctcacctggataatgaaagactccttccctttcctgtctcatcgcagccgatatggtctggagtgcagctttgacttcccctgtgagctggagtattcccctccactgcatgacctcaggaaccagagctggtcctggcgccgcatcccctccgaggaggcctcccagatggacttgctggatgggcctggggcagagcgttctaaggagatgcccagaggctcctttctccttctcaacacctcagctgactccaagcacaccatcctgagtccgtggatgaggagcagcagtgagcactgcacactggccgtctcggtgcacaggcacctgcagccctctggaaggtacattgcccagctgctgccccacaacgaggctgcaagagagatcctcctgatgcccactccagggaagcatggttggacagtgctccagggaagaatcgggcgtccagacaacccatttcgagtggccctggaatacatctccagtggaaaccgcagcttgtctgcagtggacttctttgccctgaagaactgcagtgaaggaacatccccaggctccaagatggccctgcagagctccttcacttgttggaatgggacagtcctccagcttgggcaggcctgtgacttccaccaggactgtgcccagggagaagatgagagccagatgtgccggaaactgcctgtgggtttttactgcaactttgaagatggcttctgtggctggacccaaggcacactgtcaccccacactcctcaatggcaggtcaggaccctaaaggatgcccggttccaggaccaccaagaccatgctctattgctcagtaccactgatgtccccgcttctgaaagtgctacagtgaccagtgctacgtttcctgcaccgatcaagagctctccatgtgagctccgaatgtcctggctcattcgtggagtcttgaggggaaacgtgtccttggtgctagtggagaacaaaaccgggaaggagcaaggcaggatggtctggcatgtcgccgcctatgaaggcttgagcctgtggcagtggatggtgttgcctctcctcgatgtgtctgacaggttctggctgcagatggtcgcatggtggggacaaggatccagagccatcgtggcttttgacaatatctccatcagcctggactgctacctcaccattagcggagaggacaagatcctgcagaatacagcacccaaatcaagaaacctgtttgagagaaacccaaacaaggagctgaaacccggggaaaattcaccaagacagacccccatctttgaccctacagttcattggctgttcaccacatgtggggccagcgggccccatggccccacccaggcacagtgcaacaacgcctaccagaactccaacctgagcgtggaggtggggagcgagggccccctgaaaggcatccagatctggaaggtgccagccaccgacacctacagcatctcgggctacggagctgctggcgggaaaggcgggaagaacaccatgatgcggtcccacggcgtgtctgtgctgggcatcttcaacctggagaaggatgacatgctgtacatcctggttgggcagcagggagaggacgcctgccccagtacaaaccagttaatccagaaagtctgcattggagagaacaatgtgatagaagaagaaatccgtgtgaacagaagcgtgcatgagtgggcaggaggcggaggaggagggggtggagccacctacgtatttaagatgaaggatggagtgccggtgcccctgatcattgcagccggaggtggtggcagggcctacggggccaagacagacacgttccacccagagagactggagaataactcctcggttctagggctaaacggcaattccggagccgcaggtggtggaggtggctggaatgataacacttccttgctctgggccggaaaatctttgcaggagggtgccaccggaggacattcctgcccccaggccatgaagaagtgggggtgggagacaagagggggtttcggagggggtggaggggggtgctcctcaggtggaggaggcggaggatatataggcggcaatgcagcctcaaacaatgaccccgaaatggatggggaagatggggtttccttcatcagtccactgggcatcctgtacaccccagctttaaaagtgatggaaggccacggggaagtgaatattaagcattatctaaactgcagtcactgtgaggtagacgaatgtcacatggaccctgaaagccacaaggtcatctgcttctgtgaccacgggacggtgctggctgaggatggcgtctcctgcattgtgtcacccaccccggagccacacctgccactctcgctgatcctctctgtggtgacctctgccctcgtggccgccctggtcctggctttctccggcatcatgattgtgtaccgccggaagcaccaggagctgcaagccatgcagatggagctgcagagccctgagtacaagctgagcaagctccgcacctcgaccatcatgaccgactacaaccccaactactgctttgctggcaagacctcctccatcagtgacctgaaggaggtgccgcggaaaaacatcaccctcattcggggtctgggccatggcgcctttggggaggtgtatgaaggccaggtgtccggaatgcccaacgacccaagccccctgcaagtggctgtgaagacgctgcctgaagtgtgctctgaacaggacgaactggatttcctcatggaagccctgatcatcagcaaattcaaccaccagaacattgttcgctgcattggggtgagcctgcaatccctgccccggttcatcctgctggagctcatggcggggggagacctcaagtccttcctccgagagacccgccctcgcccgagccagccctcctccctggccatgctggaccttctgcacgtggctcgggacattgcctgtggctgtcagtatttggaggaaaaccacttcatccaccgagacattgctgccagaaactgcctcttgacctgtccaggccctggaagagtggccaagattggagacttcgggatggcccgagacatctacagggcgagctactatagaaagggaggctgtgccatgctgccagttaagtggatgcccccagaggccttcatggaaggaatattcacttctaaaacagacacatggtcctttggagtgctgctatgggaaatcttttctcttggatatatgccataccccagcaaaagcaaccaggaagttctggagtttgtcaccagtggaggccggatggacccacccaagaactgccctgggcctgtataccggataatgactcagtgctggcaacatcagcctgaagacaggcccaactttgccatcattttggagaggattgaatactgcacccaggacccggatgtaatcaacaccgctttgccgatagaatatggtccacttgtggaagaggaagagaaagtgcctgtgaggcccaaggaccctgagggggttcctcctctcctggtctctcaacaggcaaaacgggaggaggagcgcagcccagctgccccaccacctctgcctaccacctcctctggcaaggctgcaaagaaacccacagctgcagagatctctgttcgagtccctagagggccggccgtggaagggggacacgtgaatatggcattctctcagtccaaccctccttcggagttgcacaaggtccacggatccagaaacaagcccaccagcttgtggaacccaacgtacggctcctggtttacagagaaacccaccaaaaagaataatcctatagcaaagaaggagccacacgacaggggtaacctggggctggagggaagctgtactgtcccacctaacgttgcaactgggagacttccgggggcctcactgctcctagagccctcttcgctgactgccaatatgaaggaggtacctctgttcaggctacgtcacttcccttgtgggaatgtcaattacggctaccagcaacagggcttgcccttagaagccgctactgcccctggagctggtcattacgaggataccattctgaaaagcaagaatagcatgaaccagcctgggccctgagctcggtcgcacactcacttctcttccttgggatccctaagaccgtggaggagagagaggcaatggctccttcacaaaccagagaccaaatgtcacgttttgttttgtgccaacctattttgaagtaccaccaaaaaagctgtattttgaaaatgctttagaaaggttttgagcatgggttcatcctattctttcgaaagaagaaaatatcataaaaatgagtgataaatacaaggcccagatgtggttgcataaggtttttatgcatgtttgttgtatacttccttatgcttctttcaaattgtgtgtgctctgcttcaatgtagtcagaattagctgcttctatgtttcatagttggggtcatagatgtttccttgccttgttgatgtggacatgagccatttgaggggagagggaacggaaataaaggagttatttgtaatgactaaaa

SEQ ID NO: 25 - DNA, 8349 bp, Homo sapiens
gggaggcagcaggttaggcagtgagaagttagtggcgctgctgggacgggggaaaggagacgcttcttcctcttgctgctcttctcgttcccgagatcagcggcggcggtgaccgcgagtgggtcggcaccgtctccggctccgggtgcgaacaatgctgactgatagcggaggcggcggcacctcctttgaggaggacctggactctgtggctccgcgatccgccccagctggggcctcggagccgcctccgccgggaggggtcggtctggggatccgcaccgtgaggctctttggggaggccgggccagcgtcgggagtcggcagcagcggcggcggcggcagcggcagcggtacgggcggaggggacgcggcgctggatttcaagttggcggctgccgtgctgaggaccgggggtggaggtggtgcctctggcagtgacgaggacgaagtgtccgaggttgaatcatttattttggaccaagaagatctggataacccagtgcttaaaacaacatcagagatattcttatcaagtactgcagaaggagcagacttacgcactgtggatccagagacacaggcacgactagaagcattgctagaagcagcaggaattggcaaattgtcaactgctgatggtaaagcttttgcagatcctgaggtactccggagactgacatcctcagttagttgtgcactggatgaagctgctgctgcactgacacggatgaaagcagaaaacagccacaatgcaggacaagtggacactcgcagtctagcagaagcttgttcagatggggatgttaatgctgttcgtaaattgctagatgaaggcagaagtgtaaatgaacatacagaagaaggagaaagcctgctgtgtttggcttgttcagcagggtattatgaattagcacaagtattgcttgctatgcatgctaatgttgaagatcgagggaataaaggagacataactcccctgatggcagcttccagtggaggttacttagatattgtgaaattattacttcttcatgatgctgatgtcaactcccagtctgcaacaggaaacactgcgctaacttatgcatgtgctggaggatttgttgacattgttaaagtgctccttaatgaaggtgcaaatatagaagatcataatgaaaatggacatactcccttaatggaagcagccagtgcaggtcatgtggaagttgcaagagttcttttagatcatggtgcaggcatcaacactcattctaatgaattcaaagaaagtgctctaacacttgcttgctacaaaggccatttggatatggttcgctttctacttgaagctggtgcagatcaagagcacaaaacagatgagatgcacactgccttaatggaggcctgcatggatggacatgtagaggtggcacgtttgcttttggatagtggtgctcaagtgaacatgcctgcagattcatttgaatctccattgacgctagctgcctgtggaggacatgttgaattggcagctctacttattgaaaggggagcaaatcttgaagaagttaatgatgaaggatacactcccttgatggaagctgcccgggaaggacatgaagaaatggtggcactactcttagcacaaggagcaaatataaatgcccagacagaagaaactcaagaaactgctcttactttggcttgctgtggaggattttctgaagttgcagactttcttattaaggcaggggctgatatagaacttggctgctccacacctctgatggaggcatctcaggagggacacctggaattggttaaatatttgctggcttctggcgctaatgtgcatgctacaacagcaacaggagacacagccttaacctatgcttgtgaaaatggacatacggatgttgcagatgttttacttcaagcaggggctgatttagaacatgaatctgaaggtggaagaacacctttgatgaaagctgcaagagctggtcatttgtgcactgtgcagtttcttattagcaaaggtgccaatgttaacagggctacagccaataatgatcatacagtagtgtcgctggcatgtgcaggaggccacctggcagttgttgagcttctcttggctcatggggctgaccctactcatcgactcaaggatggttcaacaatgctcattgaagctgcaaagggtggccatactaatgtagtttcttatctgttggattatccaaataatgttctgtcagttcccaccacagatgtgtctcagctccctccaccttctcaagatcagtctcaggtgccacgtgtgccaacgcatacacttgccatggttgtacctccccaggaacctgacagaacttcacaggagaactctcctgcccttttaggagtgcaaaaaggtacatccaagcagaagtccagttccctccaggtagcagatcaggacctactgccatcttttcacccataccagcctttggagtgcatagtagaggagactgaaggcaagctgaatgaactgggacaaagaattagtgctattgaaaaagcacagcttaagtcactggagttaattcaaggtgaacctctgaacaaagataagatagaagaacttaaaaagaacagagaagagcaagtccagaagaagaagaaaatattgaaagaactgcagaaagtggaaaggcagttgcagatgaaaacacagcagcaatttaccaaagaatacttggaaaccaaaggtcagaaagacacagtgtctctacaccaacagtgctctcatagaggagtcttcccagaaggggaaggagatggtagtctcccagaggatcacttttcagagttacctcaggttgacacaatcttatttaaagataatgatgttgatgatgagcaacagtctccaccatcggcagaacagattgattttgtcccagtccagcctttatcatctccacagtgtaacttttccagtgacttaggttctaatgggacaaattctcttgaacttcagaaagtatcaggtaatcagcagattgtaggacagcctcagattgctattactggacatgatcaggggctgttagttcaagaaccagatggactaatggttgcaactccagctcagacgcttaccgacactcttgatgacctgatagcagctgtgagtaccagagtgcccactggttccaacagttcttctcagaccacagagtgtcttacacctgaatcctgttcgcagactacaagcaatgtggcttcccaatcgatgcctcctgtgtatccttcagttgacattgatgcacatactgagagcaatcatgacacagcattaacactagcttgtgcaggtggtcatgaagaacttgtatctgtgctcattgcacgggatgccaaaattgaacacagagacaaaaaaggtttcacaccactaatcctggcagcaacagcagggcatgttggagttgttgaaatccttttggataaaggtggagatatagaagcacagtctgaacgaactaaggatactccgctttcattggcatgttctggtggacgtcaggaggtggtagacttgctgctggctcgaggtgcaaataaagaacataggaacgtatctgattatacaccactgagtctagctgcgtctggaggatatgttaatatcattaagattctgcttaatgctggggcagaaattaattcaaggactgggagtaaactaggtatttctcccctgatgttggctgcaatgaatggacatgttcctgcagtaaaattgctgctcgatatgggttcagacattaatgcccaaatagagaccaatcggaacacggctctcaccctggcctgtttccagggccgagcagaagtagtgagtttgcttctggaccgaaaagccaatgttgaacatagggcaaagacgggtcttacccccttgatggaagcagcttctggagggtatgcagaggttggaagagttcttcttgataaaggagcagatgttaatgctccccctgtgccttcctcaagagatactgctttaacaatagcagcagacaaaggtcactacaaattttgtgaactcctgattcataggggagcccacattgatgttcgtaacaaaaagggaaatacgccactttggctggcatccaatggaggtcattttgatgttgtgcagttgctagtgcaagcaggtgctgatgtggatgcagcagataaccggaaaatcacacctcttatgtcagcatttcgcaagggtcatgtaaaagttgttcaatatttggtaaaggaagtaaatcagttcccttctgatatagaatgcatgagatacatagcaacaattacagataaggaactgttgaaaaaatgtcatcaatgtgtcgaaaccattgtgaaggctaaagaccagcaagctgcagaagcaaataagaatgcgagtattcttttaaaggaacttgatctggaaaagtcaagagaagagagcagaaagcaggctcttgctgctaaaagagaaaaaagaaaagaaaagagaaaaaagaaaaaagaggaacagaaaaggaaacaggaagaagatgaagaaaacaaacctaaggagaattcggaactaccagaggatgaagatgaagaggagaatgatgaagatgtggagcaagaagttcccatagaacctcctagtgcaaccaccaccactacgattggaatctctgcaacatctgcaacattcacaaatgtgtttgggaaaaaaagggccaatgtggtgacaactcccagcaccaatcggaaaaataagaagaacaaaacaaaagaaacccctcctacagcacatttaattttaccagaacaacatatgtctttagcccaacaaaaggcagataaaaataaaataaatggagaacctagaggtggtggtgcaggtgggaatagtgattcagataacttggacagcacagactgcaacagtgagagtagcagtggtggtaaaagccaagagttaaattttgtgatggatgtgaattcctctaaatacccctcactgctccttcattcccaagaagaaaagacaagtactgctacttccaaaactcagacacgacttgaaggtgaagtgactcctaattccttgtcaaccagctacaagacagtgtcattgccattaagctctccaaacataaagctgaatctcactagccctaaaaggggtcagaaaagagaagaagggtggaaagaagttgtacgaaggtcaaagaaattgtctgttccagcctcagtggtgtcgaggataatgggaagaggaggatgcaacatcactgcaatacaggatgttactggtgcccatattgatgtggataaacaaaaagataagaatggcgagagaatgatcacaataaggggtggcacagaatcaacaagatatgcagttcaactaatcaatgcactcattcaagatcctgctaaggaactggaagacttgattcctaaaaatcatatcagaacacctgccagcaccaaatcaattcatgctaacttctcatctggagtaggtaccacagcagcttccagtaaaaatgcatttcctttgggtgctccaactcttgtaacttcacaggcaacaacgttatctacgttccagcccgctaataaacttaataagaatgttccaacaaatgtacgttcttctttcccagtttctctacccttagcttatcctcaccctcattttgccctgctggctgctcaaactatgcaacagattcggcatcctcgcttacccatggcccagtttggaggaaccttctcaccttctcctaacacatggggaccattcccagtgagacctgtgaatcctggcaacacaaatagctctccaaagcataataacacaagccgtctacctaaccagaacgggactgttttaccctcagagtctgctggactagctactgccagttgtcctatcactgtctcttctgtagttgctgccagtcagcaactgtgtgtcactaatacccggactccttcatcagtcagaaagcagttgtttgcctgtgtgcctaagacaagtcctccagcaacagtgatttcttctgtgacaagcacttgtagttccctgccttctgtctcctctgcacctatcactagcgggcaagctcccaccacatttctacctgcaagtacttctcaagcacagctttcttcacaaaagatggagtctttctctgctgtgccacccaccaaagagaaagtgtccacacaggaccagcccatggcaaacctatgtaccccatcttcaactgcaaacagttgcagtagctctgccagcaacaccccgggagctccagaaactcacccatccagtagtcccactcctacttccagtaacacacaagaggaggcacagccatccagtgtgtctgatttaagtcctatgtcaatgccttttgcatctaactcagaacctgctccattgactttgacatcacccagaatggttgctgctgataatcaggacaccagtaatttacctcagttagctgtaccagcacctcgagtttctcatcgaatgcagcccagaggttctttttactccatggtaccaaatgcaactattcaccaggatccccagtctatttttgttacgaatccagttactttaacaccacctcaaggcccaccagctgcagtgcagctttcttcagctgtgaacattatgaatggttctcagatgcacataaacccagcaaataagtctttgccacctacatttggcccagccacacttttcaatcacttcagcagtctttttgatagtagtcaggtgccagctaaccagggctggggagatggtccactgtcctcacgagttgctacagatgcctctttcactgttcagtcagcgttcctgggtaactcagtgcttggacacttggaaaacatgcaccctgataactcaaaggcacctggcttcagaccaccttcccagcgagtttctactagtccagttgggttaccatccattgacccatcaggcagctccccatcttcctcttctgctcctctggcaagtttttccggcataccaggaacaagggttttcctgcaagggccagctcctgttgggactcctagtttcaacagacaacatttttctccccatccttggacaagcgcctcaaactcatccacttctgccccaccaacgttgggccaaccaaaaggagtcagtgccagtcaagatcgaaagatacctcccccaattggaacagagagactggcccgaattcggcaaggagggtctgttgcacaagccccggcggggaccagttttgtcgctcccgttggacacagtggaatctggtcatttggtgtcaatgctgtgtcagaaggcttatcaggttggtcgcaatctgtgatggggaaccatccaatgcatcaacaattatcagacccaagcacattctcccaacatcagccaatggagagagatgattctggaatggtagccccctctaacatttttcatcagcctatggcaagtggttttgtggatttttctaaaggtctgccaatttccatgtatggaggcaccataataccctctcatcctcagcttgctgatgttccaggaggccctctgtttaatggacttcacaatccagatcctgcttggaaccctatgataaaagttatccaaaattcaactgaatgcactgatgcccagcaggccagtctgcttccttcagtccctgctctcaaaggggaaatcccatcacctcagctaaccagaccgaagaagagaattggacggccgatggtggcctctcctaaccagaggcaccaggatcatctacgaccgaaagttcctgctggagtgcaagaactcacccattgcccggacacccccctgctgcctccctcagattcccggggtcacaactcctccaacagcccctctctccaagctggaggagctgaaggagcaggagacagaggaagagatacccgatgacgcacaatttgaaatggacatctaatccagtgcagatgacctggcatgtggagttacagagggatccctcatgccactgctgccaccacctcttcctggggcatccaaaggccagctggcctcatctaatctggaagggagtgacttgttagttccaggcctcctttagttctgaggcagctagaccagggataggagtgggcaacttgccaagcccttaactctacttcctcttcagtctgtggtactcctcctaaccctaaaccctctatgctcaggggctggaactggggaatggagtaagtcaccttctgactgcttagtaaacattcaaagaaatg

SEQ ID NO: 26 - DNA, 2567 bp, Homo sapiens
caatgacaggcggcaggcggtgaccgccgcagggcctgcggagaccgtccgcctggctcgcccgagctcgcccgctgtccgccagcccgcgggagggaggagagaagcgaagcgtttccgcggttggctactcagtgtcttggtctcaagttgcctcattgcggctggcgttcccaatacagacgcatcgtttcttttttaatactccctaagaaagggaataaccttcaagctggcgggagcaatggttcacataaagaaaggcgagctgacccaggaggagaaggagctactggaagtcatcgggaaaggtactgtccaagaagctggaacattattatccagcaagaatgttcgtgtcaactgtttggacgagaatggaatgactcctctaatgcatgcagcatataaaggaaaactcgatatgtgcaaattactactgcgacatggagccgatgtaaattgtcatcagcatgaacatggatacacagccctcatgtttgctgcactttctggtaataaagacatcacatgggtaatgttagaagctggtgctgagacagatgttgtcaactctgtgggaagaacagcagctcagatggcagcctttgtgggtcaacatgattgtgtgaccataatcaacaatttctttcctcgagagagactggattattacactaagccccagggactggataaagagccaaaactgcccccaaagttggcaggcccgctgcacaaaattatcaccacaacgaatcttcatcctgtcaagatcgtgatgcttgtaaatgagaatcctctgctgacagaagaagcagccctgaataaatgctacagagtgatggatttgatttgtgagaaatgtatgaagcaaagagacatgaatgaagtattggctatgaagatgcattacataagctgtatctttcagaaatgcattaacttcttaaaagatggagagaataaactggacaccttgatcaaaagcttgttaaaaggccgagcttctgatggctttccagtgtatcaagaaaagatcattagagaaagtatcagaaaatttccttactgtgaagctacactcctccagcagctggttcgaagcattgctcctgttgaaattggttctgatcccactgcattctccgtccttacccaagccatcactggccaggtgggttttgtggatgtggaattttgcactacctgtggagaaaagggagcaagtaaaagatgttcagtttgcaaaatggtaatatattgtgatcaaacctgccagaaaacacactggtttactcataagaaaatctgtaagaatctgaaggacatttacgaaaagcaacagttggaggctgccaaagaaaagagacaagaggaaaaccacggcaaacttgatgtcaattctaactgtgttaatgaagagcaaccagaggctgaagtaggtatctctcaaaaggattccaatcctgaagattccggggaaggaaagaaagaatctcttgaaagcgaagctgagttggaaggcttacaggatgctcctgcagggccacaggtgtctgaggagtaaaagccagagcaagtgccagtgtggatgatcctcaccctgcaagaagctggaaaactcctaggaatgcattgtcctcaccttgttatacctgcgtggcaccatggcaggattccacatttcatagaatacaggttttcaagcaaacccctgttgaccatgccctaatttcctattgatttctgttctataattgaatggatattcctatggaaaattttttgtttcaaaatacaggaaaaacattcctattacctttctgaggctggctttccagcaattgtttcaaaggaaaatagatccccttaaagaaaaaatacaggctttagggaacaaagggacaagcagaacaggtgtggaagagagattttcaggaagggaaaaatttatagctacagagggtagttagaaaaatcataacttatatgtgaataaaatacatataagcagcatttacggtagtggcattctacttattaagatgcaatgaaatgaagaaaggctttatgttcaaggacctttgccatagttcagctaattgtagttttatatagaaatgatcctgaacactctgaacttgacgtagtcctgcggtgatattctatctgcagtatttgtacctccagaatggcagatccctcagcaggaacaaaggcatattgacggttctctcagcgtatgcattaaaaaaggtacttcctgaaacttttgattcaataatgactaaacatactatgtacacaattactgtaaggctaattcacgtgccatactccacctgaaagcctgagttatcttgctataagcttttcatggagcacttcctttccagaaactgatttgtaactcatttagagaatgtcctggcgtcggtttttagcatatgtggtatttaaacagagctagaatgtgatgtctgaagataatgctgcatttctgggtttcttgtgtggattttaaaataaattgtgcctacaaatataaacaaaaaaaaaaaaaa

SEQ ID NO: 27 - DNA, 2146 bp, Homo sapiens
ccaccctgggcccgcccccggctccatcttgcgggagaccgggttgggctgtgacgctgctgctggggtcagaatgtcatacccaggctatcccccaacaggctacccacctttccctggatatcctcctgcaggtcaggagtcatcttttcccccttctggtcagtatccttatcctagtggctttcctccaatgggaggaggtgcctacccacaagtgccaagtagtggctacccaggagctggaggctaccctgcgcctggaggttatccagcccctggaggctatcctggtgccccacagccagggggagctccatcctatcccggagttcctccaggccaaggatttggagtcccaccaggtggagcaggcttttctgggtatccacagccaccttcacagtcttatggaggtggtccagcacaggttccactacctggtggctttcctggaggacagatgccttctcagtatcctggaggacaacctacttaccctagtcagcctgccacagtgactcaggtcactcaaggaactatccgaccagctgccaacttcgatgctataagagatgcagaaattcttcgtaaggcaatgaagggttttgggacagatgagcaggcaattgtggatgtggtggccaaccgttccaatgatcagaggcaaaaaattaaagcagcatttaagacctcctatggcaaggatttaatcaaagatctcaaatcagagttaagtggaaatatggaagaactgatcctggccctcttcatgcctcctacgtattacgatgcctggagcttacggaaagcaatgcagggagcaggaactcaggaacgtgtattgattgagattttgtgcacaagaacaaatcaggaaatccgagaaattgtcagatgttatcagtcagaatttggacgagaccttgaaaaggacattaggtcagatacatcaggacattttgaacgtttacttgtgtccatgtgccagggaaatcgtgatgagaaccagagtataaaccaccaaatggctcaggaagatgctcagcgtctctatcaagctggtgaggggagactagggaccgatgaatcttgctttaacatgatccttgccacaagaagctttcctcagctgagagctaccatggaggcttattctaggatggctaatcgagacttgttaagcagtgtgagccgtgagttttccggatatgtagaaagtggtttgaagaccatcttgcagtgtgccctgaaccgccctgccttctttgctgagaggctctactatgctatgaaaggtgctggcacagatgactccaccctggtccggattgtggtcactcgaagtgagattgaccttgtacaaataaaacagatgttcgctcagatgtatcagaagactctgggcacaatgattgcaggtgacacgagtggagattaccgaagacttcttctggctattgtgggccagtaggagggatttttttttttttaatgaaaaaaaatttctattcatagcttatccttcagagcaatgacctgcatgcagcaatatcaaacatcagctaaccgaaagagctttctgtcaaggaccgtatcagggtaatgtgcttggtttgcacatgttgttattgccttaattctaattttattttgttctctacatacaatcaatgtaaagccatatcacaatgatacagtaatattgcaatgtttgtaaaccttcattcttactagtttcattctaatcaagatgtcaaattgaataaaaatcacagcaatctctgattctgtgtaataatattgaataattttttagaaggttactgaaagctctgccttccggaatccctctaagtctgcttgatagagtggatagtgtgttaaaactgtgtactttaaaaaaaaattcaacctttacatctagaataatttgcatctcattttgcctaaattggttctgtattcataaacactttccacatagaaaatagattagtattacctgtggcaccttttaagaaagggtcaaatgtttatatgcttaagatacatagcctacttttttttcgcagttgttttctttttttaaattgagttatgacaaataaaaaattgcatatatttaaggtgtacaaaaaaaaaa

SEQ ID NO: 28 - DNA, 6151 bp, Homo sapiens
attggtggaggcggcaagtttaaacagagtcaaaacgccatacttgtttggctcctctttttaatttgcgagtttattgggcttgttttctgttttctagggagtaggttagtggaaaagaaaaagggccgaattcactcccacgacctctacagccgcccctgaggggaagcggtcagcgtaagtcccggatccccgctccggagccgcctcgtgggagcggggcaaggagatccaggaggggtctcgaatctgccatggcgaaccggcgagtggggcgaggctgctgggaagtgagcccgaccgagcggaggccgcccgcggggctgcggggccccgcggccgaggaggaggcgtcttccccgccggtcctgtctctcagccacttctgcaggtctcctttcctttgcttcggggacgttctcctgggagcctcacggacgctgtctctggccctagacaaccctaacgaggaggtggcagaagtgaagatctcccacttcccggccgcggacctgggcttcagtgtgtcgcagcgctgtttcgtgttgcagcctaaagagaaaattgttatttctgttaactggacaccactcaaagaaggccgagtaagagagattatgacatttcttgtaaatgatgttctgaaacaccaagctatattactaggaaatgcagaagagcagaaaaagaaaaagaggagtctttgggataccattaaaaagaagaaaatttcagcctctacaagtcacaacagaagggtttcaaatattcagaatgttaataaaacatttagtgtttcccaaaaagttgacagagttaggagcccactacaagcttgtgaaaacttggctatgaatgaaggcggtcccccaacagaaaacaattctttaatacttgaagaaaataaaatacccatatcacctattagccctgctttcaatgaatgccatggtgcaacttgcttgccactctctgtacgtcgatctactacctactcatctcttcatgcatcagaaaatagggaactattaaatgtacacagtgccaacgtttcaaaagtttcttttaatgagaaagctgtaactgaaacttcctttaattccgtaaatgttaatggccaaagaggagagaatagtaaacttagtcttacccccaactgttcttcaactttgaacattacacaaagccaaatacattttctaagtccagattcttttgtaaataatagtcatggagctaataatgaactagaattagtaacatgtctttcatcagatatgtttatgaaagataattcacagcctgtgcatttggaatcaacaattgcacatgaaatttatcagaaaattttaagtccagattctttcataaaagataattatggactaaatcaggatctagaatcagagtcagttaatcctattttatcccctaatcaatttttaaaagataacatggcatatatgtgtacatctcagcaaacatgtaaagtaccattatcaaatgaaaattctcaagtcccacagtctcctgaagattggagaaaaagtgaagtttcgccacgtattcctgaatgtcagggttcaaaatctcccaaagctatttttgaagaactagtagaaatgaagtcaaattactacagttttataaaacaaaataatcctaaattttctgcagttcaggatatttctagtcatagccacaataaacaacctaagagacgtccaatactttctgccactgttactaaaaggaaggccacctgtaccagagaaaaccaaactgagattaataaaccaaaagcaaaaagatgtctcaacagtgcagtgggtgaacatgaaaaagtaataaataatcaaaaggaaaaagaagattttcattcttatcttccaattatagatccaatattaagtaaatctaagagttataaaaacgaggtaacaccctcttcgacaacagcttcagttgctcggaaaagaaagagcgatggaagcatggaagatgcaaatgtgagagttgcaattacagaacatacagaagtgcgagaaatcaaaagaatccatttttctccctcagagcctaaaacatcagctgttaagaaaacaaaaaatgtgacaacacccatctcaaaacgtattagcaacagagagaaattaaacctgaagaagaaaactgatttatcaatattcagaactccaatttctaaaacaaacaaaaggacaaaacccattatcgctgtggcacagtccagtttgaccttcataaaaccattaaaaacagatattcccagacacccgatgccatttgctgcaaaaaacatgttttatgatgaacgctggaaggaaaagcaggaacagggcttcacttggtggttaaattttatattaacccctgatgacttcactgtaaaaacaaatatttctgaagtaaatgctgctactcttcttttgggaatagagaatcaacataaaataagtgttcctagagcacctacaaaagaggaaatgtctctcagagcttatactgctcggtgtaggttaaacagactacgtcgtgcagcatgccgtttgtttacttctgaaaaaatggttaaagctattaaaaagcttgaaattgaaattgaagctaggcggttaattgttcgaaaagatagacacctatggaaagatgtgggagaacgtcagaaagtcctgaattggctgttgtcctacaatcctttgtggcttcgaattggtctagagacaacttatggagaactcatatctttggaagataacagtgatgtcacagggttggctatgtttattctgaatcgcctactttggaatcctgatatagcagctgagtatagacaccccactgttcctcacctgtatagagatggtcatgaagaagctttgtccaagtttacattgaaaaagttattgttgttggtctgttttcttgattatgctaaaatttccagactcattgatcatgatccttgtctcttctgtaaagatgccgaattcaaggctagtaaagaaatccttttggctttttcacgagatttcctaagtggtgaaggtgacctttcccgtcaccttggcttattgggattacctgttaaccatgttcagacaccatttgatgaatttgattttgccgttacaaatcttgccgtagacttgcaatgtggagtgcgccttgtgcgaaccatggaacttctcacacagaactgggacctctcaaagaaactcaggattccggcaataagtcgtcttcaaaagatgcacaatgttgacattgttcttcaagttcttaaatcacgaggaattgaattaagtgatgagcatggaaatacaattctatctaaggatattgtggataggcacagagaaaaaactctcaggttgctttggaaaatagcgtttgcttttcaggtggatatttcccttaacttagatcaattaaaggaagaaattgcctttctaaaacacacaaagagtataaagaaaacaatatctctactatcatgccattctgatgatcttattaataagaaaaaaggcaaaagggatagtggttcctttgaacaatatagtgaaaacataaagttattgatggattgggtaaatgctgtttgtgccttctataataaaaaggtggagaattttacagtgtctttctcagacggccgtgtgttatgttacctgatccaccattaccatccttgctatgtgccatttgacgctatatgtcagcgtactactcaaactgtggaatgtacgcaaactggttcagtggtattaaattcatcatctgaatctgatgacagttctctggatatgtctcttaaagcatttgatcatgaaaatacttcagagctatacaaagagctcctagaaaatgaaaagaaaaattttcacttggttaggtctgcagttagagaccttggtggaatacctgctatgattaatcattcagatatgtcaaatacaattccagatgaaaaggtggttattacctatttgtcatttctttgtgcaaggcttttggatcttcgtaaagaaataagagctgctcgactcatacaaacaacatggagaaaatataaactaaaaacagatctcaaacgccatcaggagagagagaaagctgcaagaattattcaattggctgtaatcaattttctagcaaaacaaagattgagaaaaagagttaatgcagcactcgtcattcagaaatattggcgaagagtcttagcacagagaaaattattaatgttaaaaaaggaaaagctggaaaaagttcaaaataaagcagcatcacttattcaggctatgtggaggagatatagagccaagaaatatttatgtaaagtgaaagctgcctgcaagattcaagcctggtatagatgttggagagcacacaaagaatatctagctatattaaaagctgttaaaattattcaaggttgcttctataccaaactagagagaacacggtttttgaatgtgagagcatcagcaattatcattcagagaaaatggagagctatacttcctgcaaagatagctcatgaacacttcttaatgataaaaagacatcgagctgcttgtttgatccaagcacattatagaggatataaaggaaggcaggtctttcttcggcagaaatctgctgctttgatcatacaaaaatatatacgagccagggaggctggaaagcatgaaaggataaaatatattgaatttaaaaaatctacagttatcctacaagcactggtgcgtggttggctagtacgaaaaagatttttagaacagagagccaaaattcgacttcttcacttcactgcagctgcatattatcacctgaatgctgttagaattcaaagagcctataaactttacctggctgtgaagaatgctaacaagcaggttaattcagtcatctgtattcagagatggtttcgagcaagattacaagaaaagagatttattcagaaatatcatagcatcaaaaagattgagcatgaaggtcaagaatgtctgagccagcgaaatagggctgcatcagtaatacagaaagcagtgcgccattttctcctccgtaaaaagcaggaaaaattcactagtggaatcattaaaattcaggcattatggagaggctattcttggaggaagaaaaatgattgtacaaaaattaaagctatacgactaagtcttcaagttgttaatagggagattcgagaagaaaacaaactctacaaaagaactgcacttgcacttcattaccttttgacatataagcacctttctgccattcttgaggccttaaaacacctagaggtagttactagattgtctccactttgttgtgagaacatggcccagagtggagcaatttctaaaatatttgttttgatccgaagttgtaatcgcagtattccttgtatggaagtcatcagatatgctgtgcaagtcttgcttaatgtatctaagtatgagaaaactacttcagcagtttatgatgtagaaaattgtatagatatactattggagcttttgcagatataccgagaaaagcctggtaataaagttgcagacaaaggcggaagcatttttacaaaaacttgttgtttgttggctattttactgaagacaacaaatagagcctctgatgtacgaagtaggtccaaagttgttgaccgtatttacagtctctacaaacttacagctcataaacataaaatgaatactgaaagaatactttacaagcaaaagaagaattcttctataagcattccttttatcccagaaacacctgtaaggaccagaatagtttcaagacttaagccagattgggttttgagaagagataacatggaagaaatcacaaatcccctgcaagctattcaaatggtgatggatacgcttggcattccttattagtaaatgtaaacattttcagtatgtatagtgtaaagaaatattaaagccaatcatgagtacgtaaagtgatttttgctctccgtgtacaacttttaaaatctgactttgttttaaaaaaacataaactgttcattacattcttcatttttatcatttatagttttatgcatgtaataaactaatatgtcataagatgaaaaaaaaaaaaaaaaaaa

SEQ ID NO: 29 - DNA, 5871 bp, Homo sapiens
ggaagcactcggcaatcgctcggcctcccccatcccccggtaacggtcgctggtgagtttaaatgagcaggggctggccgggccggagccgctacagggggggcctgaggcactgcagaaagtgggcctgagcctcgaggatgacggtgctgcaggaacccgtccaggctgctatatggcaagcactaaaccactatgcttaccgagatgcggttttcctcgcagaacgcctttatgcagaagtacactcagaagaagccttgtttttactggcaacctgttattaccgctcaggaaaggcatataaagcatatagactcttgaaaggacacagttgtactacaccgcaatgcaaatacctgcttgcaaaatgttgtgttgatctcagcaagcttgcagaaggggaacaaatcttatctggtggagtgtttaataagcagaaaagccatgatgatattgttactgagtttggtgattcagcttgctttactctttcattgttgggacatgtatattgcaagacagatcggcttgccaaaggatcagaatgttaccaaaagagccttagtttaaatcctttcctctggtctccctttgaatcattatgtgaaataggtgaaaagccagatcctgaccaaacatttaaattcacatctttacagaactttagcaactgtctgcccaactcttgcacaacacaagtacctaatcatagtttatctcacagacagcctgagacagttcttacggaaacaccccaggacacaattgaattaaacagattgaatttagaatcttccaattcaaagtactccttgaatacagattcctcagtgtcttatattgattcagctgtaatttcacctgatactgtcccactgggaacaggaacttccatattatctaaacaggttcaaaataaaccaaaaactggtcgaagtttattaggaggaccagcagctcttagtccattaaccccaagttttgggattttgccattagaaaccccaagtcctggagatggatcctatttacaaaactacactaatacacctcctgtaattgatgtgccatccaccggagccccttcaaaaaagacttttcgtgttttacagtctgttgccagaatcggccaaactggaacaaagtctgtcttctcacagagtggaaatagccgagaggtaactccaattcttgcacaaacacaaagttctggtccacaaacaagtacaacacctcaggtattgagccccactattacatctcccccaaacgcactgcctcgaagaagttcacgactctttactagtgacagctccacaaccaaggagaatagcaaaaaattaaaaatgaagtttccacctaaaatcccaaacagaaaaacaaaaagtaaaactaataaaggaggaataactcaacctaacataaatgatagcctggaaattacaaaattggactcttccatcatttcagaagggaaaatatccacaatcacacctcagattcaggcctttaatctacaaaaagcagcagcagaaggtttgatgagccttcttcgtgaaatggggaaaggttatttagctttgtgttcatacaactgcaaagaagctataaatattttgagccatctaccttctcaccactacaatactggttgggtactgtgccaaattggaagggcctattttgaactttcagagtacatgcaagctgaaagaatattctcagaggttagaaggattgagaattatagagttgaaggcatggagatctactctacaacactttggcatcttcaaaaagatgttgctctttcagttctgtcaaaagacttaacagacatggataaaaattcgccagaggcctggtgtgctgcagggaactgtttcagtctgcaacgggaacatgatattgcaattaaattcttccagagagctatccaagttgatccaaattacgcttatgcctatactctattagggcatgagtttgtcttaactgaagaattggacaaagcattagcttgttttcgaaatgctatcagagtcaatcctagacattataatgcatggtatggtttaggaatgatttattacaagcaagaaaaattcagccttgcagaaatgcatttccaaaaagcgcttgatatcaaccctcaaagttcagttttactttgccacattggagtagttcaacatgcactgaaaaaatcagagaaggctttggataccctaaacaaagccattgtcattgatcccaagaaccctctatgcaaatttcacagagcctcagttttatttgcaaatgaaaaatataagtctgctttacaagaacttgaagaattgaaacaaattgttcccaaagaatccctcgtttacttcttaataggaaaggtttacaagaagttaggtcaaacgcacctcgccctgatgaatttctcttgggctatggatttagatcctaaaggagccaataaccagattaaagaggcaattgataagcgttatcttccagatgatgaggagccaataacccaagaagaacagatcatgggaacagatgaatcccaggagagcagcatgacagatgcggatgacacacaacttcatgcagctgaaagtgatgaattttaacttctggaaatcagacttttacaactggatgtgtgactagtgctgacgtgtttcttgtccctctgtatactgagtctttactcttgagctggcggtgtcatcgtccgtcacttataccatgagtgtgccactttcattggaccctgactgtatacagaatgaaaggcagtgcaatatttagctgctaacaagactggctcttttaccagtatgaatgacaatttatggggggtagggtggggaactttcttttctgtttttctttaatctccctttgttggaaagtatcatgaaaggaagagttatgctttatcttgaaggaaccattagatatggaaaatagtgatgaaccagagtttcttggttgctttttcaaaaatttgtttttatttggttctgttcctgataaacagagtaactgaccttcatttctaggttcttcaagaatggtgtttgcaagtgccagatggaacaataaaagacgttgcctataacagtgacttgattgccaaggaatgtaaattaccttaaacttgcagtatctcccataaacaaatgtaatgggcatattgggactcgtatgtaggaatcaaatatccctccatacagtgtactcttattcttggcaagaatgctttaatgtctaaccaagaattttaatttattcatcttgcttcaaagtgttgatcattgttgtcttggtattgcaaactttaaaattgtttcttaccatattgcctcttctctttgagctctgtgggatcacctttaacattcagagatgatagagtggttccccactgagaagccaaaacaaggcccttaataaccccttaagttcaccatatgaatcagaaggagaacactaaagtggagagacttttaagagatcatgatagtgaaagccttaatataatcagaattgtaccataaccttgaatctatatttgttcaaaacatccctttgacttttctaagtgtttgcttaagcagagtgtaagaatgtgtggttacctttggttgagatcctttccattctttttgactctctgcttcagattttttcagtagtgtgagtcaccaaaacatttactaagagtaattgggtttaggatgttggaaatttttagcttgggggaaaaaacattcttatgaaggagataggttctcttctgagtttgtcataatatagattggtgtctttggaaaatggccacaattttaagaattcaattatgcatataaaatgataattattggaattccacagtaacagatttaaacagtcttaaattgtttatctcctttactgtaatgtattgaaatttttagagaaattttagttgttaacattttattaagtgccagtgtcagaatataacaaattatagtttcttatgaatgacaggcctacagttattattctggattatttgatggaggacaaacttacctgtatttgttagtcaagctgtgaaaataaggtggattacaaaagatgtgaaaaaaattttagtctgtagactcagtaattttctataatttactgttaatctcatttgaacatggattaggtacaatttataaattaattcaagtcagggtctttaggtatcaggtgccagagagatatttaacagatttccctacctaaatttatgtatatgtactgtctaaaacaatacttttttaaaaaaaaggaacagttgggagaaaataaatataatgaaaaattcccagaggctagcacttggattctaacacgtatgctattgtattatccattagttctgtaatatttaattttagattcttttatttttttaattggcaaagcacaaggtgctgtataacagtgtcatttagagttttatagaaagcttcaacctgagttctgcgttataaagcctggagaaagctaagcttagaacataacttgctgaagtataattatctttttgtagcaggaatttatgtgccagaggtgagagtctttctggtactgattttttgagaccaaggataaaaggatcgttttgtaagacatgccatggcaatggctggttgggggacagtttccgcccaagcttggcctattttatttttcctcatacctactttcaaagtcatttaggtatttgaagccttatttcccacgtagtaacactttctggcttttgcagtttctttttttgtttggttttgttttttgcatggaatggggatcaaacaacccgaagaagaacacattttgatcaagcaaaatgtttgcttcaaatttcagaagtttattttacagaaattaaattaagtagtttgacatccttttctctgtttcacacatatattaggttggtgcataagtaattgtggtttttgccatgacttttatggcaaaacctgcaattacttttgcaccaacttaatacatctatatacatatatatatacgcgcacacacttgttcagaagttatgttgtggccttggatttgtttttccccttggaaatggttcttaactctgggattttagaaggttagaatattttttcaagagaacagtggtactcaaaagaatgaaaggtggtccctacattttctgtattcatcacttaaaatttttaatttttccgagaactacaagtaacatttgaaccatgctgctgttgtaccttaaacaaaaactcagtgataaccagtatttagtctattaaaaatgctctttttgaagaaaaaagtttggaagtctctgattagccagagtatagtatgagtcttcactgagaaatatggtgacccattttctttgtgaaaacctgggaaaatgcaagtgtgggtatgaagtgtgtgttctgtttgcattgaaacaatgtaattttgtgtcttctttttgctttaactgacttatttcagaaattgtacagtgttgagggggaaagtcttttctgttaatatatttgcaattcattaaaggatatggaaaatccaaataagttacttttgaaagcaatttataatcaagttgttaaagctatatgaaagctgtgccatctgtattttaataagaaggcacagaaaaacagagatacagttttatgtttcacaaaaaactagagcaatgtttatctaattttttaaaacttacactcttaatatatttatatttttaaacggtcatactcttttttagtattatttggaatatcaaaataaatactatgacaaaaacaatggtaa

SEQ ID NO: 30 - DNA, 10826 bp, Homo sapiens
atgaccaatgggtctgtgttttggaccggcgaagcccaatggcgcgacagggaaggcgggcccgagatgggttagggtgtccttgcagggtgtctgagctaaacttcaccaaataatagctgtttgtattttggctgctgcaggagccattttagaaataaatatcttccttcaatagatgaaaatgaaaatacagaaaaaagagaagcagttgtcaaatttaaaagttttgaatcactccccaatgtctgatgcctctgtcaattttgactacaaatctccatccccatttgactgcagcactgatcaagaagagaaaattgaagatgttgctagtcactgtctgcctcagaaggacctgtatactgctgaagaggaagctgctaccctttttcctaggaaaatgacatcccataatgggatggaggacagtggaggaggaggtactggagtgaagaagaaacggaagaaaaaggagccaggagaccaagagggtgcagcaaagggaagcaaggacagagagcccaagccaaagaggaaacgagaaccgaaagagccaaaggaacccagaaaggccaaggagccgaagaaggccaaggagcacaaggagccgaagcaaaaagatggggcaaagaaggcacggaagccccgggaggcctcgggcaccaaggaggccaaagagaagaggagctgcactgactctgcagccaggacgaagtccaggaaggccagcaaggagcaaggaccaaccccagtggagaaaaagaagaaaggaaaaaggaaaagtgaaactacagtggagagtttagagctggatcagggcctgacgaacccatctctgcggagtcctgaggagtccactgagtctacagacagccagaaacgacgctcgggaaggcaagtaaagcgcagaaaatacaatgaggacctggacttcaaagtggtggatgatgatggggaaacaattgctgttcttggagctggtcgaacatctgcactctcagcctctacactggcctggcaggcggaggagcctccagaagatgatgcaaacatcattgagaagatcctggcatctaagactgtccaggaggttcacccaggagaacctccgttcgacttggagctgttctacgttaagtatagaaatttttcctacttacattgtaaatgggccacaatggaagagctcgaaaaggatcctcgcatcgcacagaagatcaagcgatttaggaataaacaagcccagatgaagcacatttttacggagcctgatgaagacttgttcaatccagactatgtagaagttgatcgcatcttggaggtggcccacaccaaggatgcagaaacaggggaggaggtaacacattacctggtgaagtggtgctcactaccatatgaagaaagcacgtgggagctagaggaagatgtagatcctgcaaaagttaaagaatttgaatctcttcaagttctccctgaaattaagcatgtggagcggcctgcttcagactcctggcagaaacttgagaagtctcgcgagtataagaacagtaaccagctccgggagtaccagctggaagggatgaactggcttctttttaactggtataacagaaaaaactgtattttggctgatgagatgggcctagggaaaaccatccagtccatcacattcctttcagaaatatttctgagaggaatccacggcccttttctcattatcgcccctctctccaccatcactaactgggagcgggagttccggacatggacagagatgaatgccattgtgtaccacggcagccagatcagcaggcagatgatccagcagtatgaaatggtgtacagagacgcccagggaaaccccctttcaggagtcttcaagttccacgtcgtcatcacaacatttgaaatgatcctagcagactgcccagagttgaagaagattcactggagctgtgtgataattgatgaagcccacagactgaagaataggaactgcaaacttctggagggtctaaagcttatggccctggaacataaagtgcttctcactggaacacccttgcagaactctgtggaggagctcttcagtttgttaaattttctggagccatcacagtttccttcagagaccgctttcttggaggaatttggagatctgaaaacagaggagcaggtaaagaaactgcagtctatcctaaaaccaatgatgcttcggcggctgaaagatgatgtggaaaagaaccttgctcccaaacaagagacgatcattgaggtggaactgaccaatatccagaaaaagtactaccgtgccatcctcgagaagaacttttccttcctgaccaagggggcaaatcagcacaacatgcccaatctcatcaacaccatgatggagctgaggaagtgctgtaaccatccctacctgatcaatggagcagaggagaaaattctagaagatttccgaaaaacccacagccctgatgcccctgactttcagctgcaggccatgattcaggcagcaggaaagcttgtgttgattgataaactactccctaagctgattgcaggtggccacaaagtactcatcttctcccagatggtgcgctgcctcgacatcctagaagattacctcatccagagaagatacacctatgagcgaattgatgggcgagtacggggaaacctgcgccaggcagccatcgaccggttctgtaagccagattcagaccgctttgtctttcttctgtgcaccagagcgggaggcctggggatcaatctcacagctgctgatacctgcatcatatttgattctgactggaacccacaaaatgacttgcaggctcaggcccgatgtcaccgcataggccagagcaaagctgtgaaggtgtatcgcctcatcactcgaaattcctacgagcgcgagatgtttgacaaggccagcctaaagctggggctggacaaggctgttcttcaggacatcaaccgaaagggcggcaccaatggggtacagcagctctcaaaaatggaggtggaggacctactccggaaaggtgcttatggagccttaatggatgaagaagatgaaggctccaagttctgtgaagaagacatagaccagattctgcagaggcgaacgcacaccatcaccatccagtctgaggggaaagggtccacttttgccaaggctagctttgtggcttcaggaaacagaacagatatttccttagatgatcctaacttttggcagaaatgggctaaaatagctgaactagacactgaagcaaagaatgaaaaggaaagcttagtgatcgaccgacctcgcgtgagaaagcagaccaaacactacaactcgtttgaggaagacgagctcatggagttttcagagttagacagcgactcagacgaaaggcccacgagatccaggcgcctcaatgacaaagccaggcgctacctccgagcggagtgcttccgggtagagaagaacctgctcatctttggctggggccggtggaaggacatcctgactcatggccgattcaagtggcatctgaacgagaaggacatggagatgatttgccgtgccctcctggtgtactgtgtcaagcattataagggggacgagaagatcaagagtttcatttgggaactgatcacacctaccaaagatgggcaagcccagaccctccagaaccactcaggcttatctgccccagtccccagagggaggaaggggaagaagacgaagaaccagttgctaatcccagagctaaaggatgcagattggctagccacctgcaaccccgaggtggtcttgcatgatgatggctataagaaacacctcaaacagcactgcaacaaagtacttttgcgagtccggatgctgtactacctaaaagctgaaatactgggagaagcagctgagaaagcatttgaaggatctcctgccagggagctggatgtacctctgcctgacatcgactacatggagatcccagtggactggtgggatgctgaagccgataagtcacttctcattggcgtgttcaagcatggttatgaaaggtacaatgccatgcgagcagacccagcactttgcttcctggagaaagttgggatgcccgatgagaagtccctttctgcagaacagggtgttacagatgggacctcagacattcctgaaagaggcaacacagataaagaagacaatgctgaggacaaagtagatggcctccagaaacaaacggagagttccagtgatggaggtgatggcgtttttagcgaaaagaaggatgacagccgggcagcccaggatggctccgacccagacaaatcgccctggccagtttcctccgccctcacagctcgtctcagacgtctggtcactgtttaccagcgctgcaaccgcaaggaactgtgccggcctgaaattctgggaccaggtaaccaaggatattgggttcaggaagagatgttcaggagaacctcagaaatggacctcatcaacaaggaagcccaaaagaggtggactaggagagaacaagcagacttctatagaacagtgtcttcctttggtgttgtttacgatcaagaaaagaaaacctttgactggacacagttccgcatcatttcccgtttggacaagaagtcggatgagagcctggaacagtatttttatagttttgtggccatgtgccggaatgtctgtcgtctacccacatggaaagatggcggtcccccagataccaccatctacgttgaacccatcactgaggaacgtgctgcaagaactctgtaccgcattgaactgttacggaaagtccgagagcaagtgctcaagtgccctcagctgcatgaacgcctccagctgtgcaggcccagcctctacctcccagtctggtgggagtgtgggaagcatgatcgagacctgctcatcggcactgccaaacatgggctgaaccgcactgactgttacatcatgaacgacccccagctgtccttcctggatgcctatagaaactatgcccagcataaaagatctggcacccaggcaccaggaaatctctgttgcctttaccagaccaactccaagttatatgaatctcttacatattctcaaatgagtaggacttcagagtcccttgaaaatgaacctgaaaatctagtgagagtagaaagcagagatgatcatctcagcctgcctgatgtgacatgtgaaaactttatttctaaagttcaggatgtcatttccatcaaccatgatgaaagtctgctgcctgagtccttagagagcatgatgtatggtaagaaggtgctcagccaagaaccaagctcttttcaggagagcccaagtaccaatactgaatctagaaaagatgttattaccatctcaataagcaaagatgggaactgccagtctggtggccctgaggcagaaatagcttctggccctacttttatgggtagcttagaagcaggaggagtagctcaagcaaacatcaaaaatggaaaacatttgttgatgtctatttcaaaggaaggggagctctgctgcagtgaggcaggacagagacctgaaaacattggccagctggaagccaagtgtttagcttccccttccttgaatccaggaaatgaaagtgggtttgtagatatgtgcagtcttagtgtctgtgactccaaaagaaacctgtcatcagatcagcaattaattgatttattggaaaacaaaagcttagaaagtaaattgattttgagtcagaaccacagtgatgaggaggaagaagaggaggaaaacgaggaggaaaacttagccatggcagtaggcatgggggaaaggccagaggtattgcatctcacggagcccactactaacatctcaagggaaaagaaccaaggcttccaagatgaaaccaagaaaggaagcttagaggtggcaaaccagactcctgggctacagagggctttccccgctccagcagcctgtcagtgccactgcaaacacatggagaggtggatgcatggcctcgagaatgatgaatttgaaatcgagaaacccaaggcttatatcccagatctgttcaaaagtaaaaccaatactatcgccatggagggtgaacccactgctattccatcacagccgtttaaagtgaagcatgagcttttaaaagaaccttggaaagaaagtgcagaggggcaaaacgttttccccacatatcctcttgaaggaagtgagctcaaatcagaagacatggattttgagaataaagatgattatgatagagacggaaactgccatagtcaagattatccagggaagtactctgaagaggagagcaagagctcaacatcgggcatcacaggagacattggggatgagctacaggaggctcgagctcccactattgctcagctgctacaggagaaaactctctattccttctctgagtggccaaaggaccgcgtgataattaaccgcctagataatatctgccacgtggtgttaaaggggaagtggccctctagccagcagtatgagccctcaggcacactgcccaccccggtattaaccagcagtgctggttctcgaaccagcctctcagagccggaagcagcagaacacagcttcagcaacggcgcagcattggcggcccagatccacaaggagagcttcttagctccagtattcacaaaggatgaacaaaagcacaggcgtccctatgagtttgaggtggagagggatgcaaaggctcggggcctggagcagttctctgccacccacgggcacacccctatcatcctcaatggctggcatggggagtcagctatggacctctcctgctcatcagaggggtccccaggagccacatcccctttcccagtgagcgccagcacccctaagattggggctatcagttcacttcagggagcccttggcatggacttgtctgggattctgcaagctggcctgatccatcctgtgactggacagattgtcaatggaagcctcagaagagatgatgcagccacgaggaggcggagagggaggcggaaacatgttgaaggagggatggacctcatctttttgaaggagcagacacttcaggcgggaatcttggaagtccatgaagacccagggcaggccaccttgagcaccacacaccctgaggggccagggcctgccacctcggctcctgagccagctacggcagccagcagccaagccgagaaatccattcccagcaagagtctgcttgactggctaaggcagcaggctgactactccttagaagttcctggctttggggcaaatttttcagacaaaccaaagcagaggaggccacgctgtaaagaacctggaaaattagatgtcagctccctgagcggggaagagagagttcctgccatccccaaggagccaggactgagggggtttcttccagaaaacaagttcaatcacactctggctgagcctattcttcgagatacgggcccccgcaggagggggaggcggcctcggagcgaactcctgaaggctccttccattgtggcagactctccctctggaatggggccactgttcatgaatggactgattgctgggatggacctggtaggacttcagaacatgagaaatatgccaggcatccccctcaccgggctggtggggtttccagctggctttgccacgatgccaacaggtgaagaggtcaaaagtaccctgagcatgctgcccatgatgctgccaggcatggctgctgtgccccagatgtttggtgttgggggactcctcagtccacccatggcaaccacctgcacttccactgctccggcgtctctatcaagcacaacgaaaagtggtacggcagtgactgaaaagactgcggaagacaagccgagtagccatgatgtgaaaacagacactttagctgaggacaagcctggtccaggtccattttctgatcagtctgaacctgcaataactactagtagtcctgtggcttttaacccatttctcatcccaggagtatctcctggactcatttacccatccatgttcctctcccctggtatgggcatggctctgccagccatgcagcaggccagacactcggaaatagtaggtctggagagccagaagaggaagaagaagaagacaaagggggacaaccccaactcccacccagagcctgctcccagctgtgaaagggagcccagcggtgatgagaactgtgccgaacccagtgcccctttgcccgcagagagagaacatggggcacaggctggggagggggcactcaaagactccaacaacgacaccaattagaacttttttcatttaagaaattattgtgacttgtaagtttcttatcccataaaggtttgttacttccctcacttcacctccataagaacctgtgtttccataagtaagattacgtacctgatttcctgtctgagaactatggtaacagatgttaatagttgcagggtctcaccacttcattagataagtgttgtctacctagtctaggaggcacagaattctcattctgttatccagttcattccagcaatcatagttaatacagtacttggtgacacgccctacccccttctcttccaagtttcccactcacttgaggaggaaaaatggcaaaagaaagctgtctagggttttaccattgaagggtggaagaacagagacaaagaggagctctttttctgtgagctgggttgcacaggaagaatgtcacagggaaccaaaaagcacagaaaaaggaagtgctggtgcatatttttgagttaaaatatttccctattttatcatgattactaagtgagtagtatagacagaagtatataactaatggttgaaaatacatatattcatttctttataaaaaacaaaaaccttaccggtagtaatataatttcccccttggtggtttttcagacacctgcagcaagaagaaatactgactgactaggcattattttctatacatccctctcaccagtgaaaagattcctcttgctgcgagaaagctttacccaccatgagttattgctgtcgacgggggtggggcaaggacccgcgctccgtagagctacacgctgcttcacaagcacacggctagcgctctgctctcacctggttcgcttacagatttctctagccattaatttgcctctctgtgtttaaagagcaccaggaccgaatggattttcacttcaggctttccttcaccaagaataaggttctttctggagcctgcaagaagacagttgcccaacactttgacacttgctagtaggtcctttgatcaagagtgtctgaggctgtcaaatgtgtgccaccctttataatacagctatgaaaagttacttctccattaatttctccattctgtttatatcttacagttggacccaaattccaaattatcagttaatcgaaactacattgcaagtcaacattattttctcttcttcctcagcttctccatgtttaggaactgagaaagaacctgcctaagcagcacttccccatgtcctttcaccttcatgttaacgtcccttctgatggtctcactcttcacaggtagttcacactctgagacttgaagtaagctcatggttcagtactctgggggcgcagggctgcgcaggacccttggaaatgttgcaagtgttactagtaccagtttcactttttgttgtcacaatttactgtattttttactttttctgttacagttttgctaatttatcagaaggtccaaaagtctgacataactatttcattttgcattatttatttatgatgcttttttcattgtcttttatacatttgggattataaattatgtaaatgttaaaatgagcatctcaaagaagtctgttaaatcatgactgaaaaaaatcaatcagatgtatcttcaaaaagtggagtcccagttttatgaatcagagatataaaccagaaattctataactgatcatagaagaagaatccagtaattgaacaaatcctatttaatgacatccttgtagcatagatggtctataatgctgaccacagatttcttagaaatgctgctctctctatttaactaacattttgttcagttttgcctccagtggaagcagaaagggttttttcagctgttaaatcctaaaaatcaatataatttatttatgtaagaaaaataactcaatcaatatatttttgaaccttttaagtactaattttctttttatcaagtagaaaaaaaaatgtatttgccctaaatccttaaaatacaaatgctataaaaattcctgtatcttgaaagccttactgcaaatgagtattatagacatccagcagagtctggttttctttgttgtcgttgtgttgttgttgttttgtatggaaaagctgctttccccgggttccacttataacctccggtaggtcacagggttcaatgtggatctgacttaaaaacccaccagcatgctcaatcccttgttatccttatggaatctgtatgttaactctctgggtgttcaggcttctatttgactgctgttgtgaccctgtttgcaaaatgaatatgacactctgtggattatttgctctgtaaggcacaagtgcttcttatgattattttgacgtttccaagagcaaaagccaaatttaaactctcttcagcaaacttgagccttttcatctaattccatgtcactcacggccataactttccttgaccattcttcaccccatgtcttacataataaattgtggtcttgatcctggatttaaaaacaaaaaaaaaaaa

SEQ ID NO: 31 - DNA, 7983 bp, Homo sapiens
agggatcctacctcttttgaccggagatgttgaaaagcacgaccaaagtttttggcttggtctcttgctttccacaacgagataaagtctgaagcctgtaactctccctgtcccgcgggagcgtgcaaagggagggaagataagcggcgtgggtgaggggtggcggcgcagaacccaggaagggagcagaggcgagagccagcctccggcaggagggcgtagaccccggtgccagccagaacggctccagccttcccgcggccagagagccagcggcgggaggggacgggcgggacctccgcggacagccccgggtgcggaccagcgggcagcggccggcgagaccctccctggatccgcccagagcttaccggaccctgcgcgcccccgtcccggctcccggccggctcgggggagaaggcgcccgaggggaggcgccggacagatcgcgtttcggaggcggcgcaggtgctgtaaactgcaaaccataatcctgtcttaatactgcaaacaaatcatagtggaactaaggggaacttaatttactgtttccaggttaactaaggtctcagctgtaaaccaaaagtgagaggagacattaagattttcattcttaccgggttgtcttcttcctgaagagcaatggagccgcttttacttggaagaggactaatcgtatatctaatgttcctcctgttaaaattctcaaaagcaattgaaataccatcttcagttcaacaggttccaacaatcataaaacagtcaaaagtccaagttgcctttcccttcgatgagtattttcaaattgaatgtgaagctaaaggaaatccagaaccaacattttcgtggactaaggatggcaaccctttttatttcactgaccatcggataattccatcgaacaattcaggaacattcaggatcccaaacgaggggcacatatctcactttcaagggaaataccgctgctttgcttcaaataaactgggaatcgctatgtcagaagaaatagaatttatagttccaagtgttccaaaattcccaaaagaaaaaattgaccctcttgaagtggaggagggagatccaattgtcctcccatgcaatcctcccaaaggcctcccacctttacacatttattggatgaatattgaattagaacacatcgaacaagatgaaagagtatacatgagccaaaagggagatctatacttcgcaaacgtggaagaaaaggacagtcgcaatgactactgttgctttgctgcatttccaagattaaggactattgtacagaaaatgccaatgaaactaacagttaacagttcaaattccatcaagcaaagaaaacccaaactgctgttgcctcccactgagagtggcagtgagtcttcaattaccatcctcaaaggggaaatcttgctgcttgagtgttttgctgaaggcttgccaactccacaggttgattggaacaaaattggtggtgacttaccaaaggggagagaaacaaaagaaaattatggcaagactttgaagatagagaatgtctcctaccaggacaaaggaaattatcgctgcacagccagcaatttcttgggaacagccactcacgattttcacgttatagtagaagagcctcctcgctggacaaagaagcctcagagtgctgtgtatagcaccggaagcaatggcatcttgttatgtgaggctgaaggagaacctcaacccacaatcaagtggagagtcaatggctccccagttgacaatcatccatttgctggtgatgttgtcttccccagggaaatcagttttaccaaccttcaaccaaatcatactgctgtgtaccagtgtgaagcctcaaatgtccatggaactatccttgccaatgccaatattgatgttgtggatgtccgtccattgatacaaaccaaagatggagaaaattacgctacagtggttgggtacagtgctttcttacattgcgagttctttgcttcacctgaggcagtcgtgtcctggcagaaggtggaagaagtgaaacccctggagggcaggcggtatcatatctatgaaaatggcacattgcagatcaacagaaccaccgaagaagatgctgggtcttactcatgttgggtagaaaatgctataggaaaaactgcagtcacagccaatttggatattagaaatgctacaaaacttagagtttctcctaagaatcctcgtatccccaaattgcatatgcttgaattacattgtgaaagcaaatgtgactcacatttgaaacacagtttgaagttgtcctggagtaaagatggagaagcctttgaaattaatggcacagaagatggcaggataattattgatggagctaatttgaccatatctaatgtaactttagaggaccaaggtatttactgctgttcagctcatactgctctagacagtgctgccgatataactcaagtaactgttcttgatgttccggatccaccagaaaaccttcacttgtctgaaagacagaacaggagtgttcggctgacctgggaagctggagctgaccacaacagcaatattagcgagtatattgttgaatttgaaggaaacaaagaagagcctggaaggtgggaggaactgaccagagtccaaggaaagaaaaccacagttatcttacctttggctccatttgtgagataccagttcagggtcatagccgtgaacgaagtagggagaagtcagcctagccagccgtcagaccatcatgaaacaccaccagcagctccagataggaatccacaaaacataagggttcaagcctctcaacccaaggaaatgattataaagtgggagcctttgaaatccatggagcagaatggaccaggcctagagtacagagtgacctggaagccacagggagccccagtggagtgggaagaagaaacagtcacaaaccacacattgcgggtgatgacgcctgctgtctatgccccttatgatgtcaaggtccaggctatcaatcaactaggatctgggcctgaccctcagtcagtgactctctattctggagaagactatcctgatacagctccagtgatccatggggtggacgttataaacagtacattagttaaagttacctggtcaacagttccaaaggacagagtacatggacgtctgaaaggctatcagataaattggtggaaaacaaaaagtctgttggatggaagaacacatcccaaagaagtgaacattctaagattttcaggacaaagaaactctggaatggttccttccttagatgcctttagtgaatttcatttaacagtcttagcctataactctaaaggagctggtcctgaaagtgagccttatatatttcaaacaccagaaggagtacctgaacagccaacttttctaaaggtcatcaaagttgataaagacactgccactttatcttggggactacctaagaaattaaatggaaacttaactggctatcttttgcaatatcagataataaatgacacctacgagattggagaattaaatgatattaacattacaactccatcaaagcccagctggcacctctcaaacctgaatgcaactaccaagtacaaattctacttgagggcttgcacttcacagggctgtggaaaaccgatcacggaggaaagctccaccttaggagaagggagtaaaggtatcgggaagatatcaggagtaaatcttactcaaaagactcacccaatagaggtatttgagccgggagctgaacatatagttcgcctaatgactaagaattggggcgataatgatagcatttttcaagatgtaattgagacaagagggagagaatatgctggtttatatgatgacatctccactcaaggctggtttattggactgatgtgtgcgattgctcttctcacactactattattaactgtttgctttgtgaagaggaatagaggtggaaagtactcagttaaagaaaaggaagatttgcatccagacccagaaattcagtcagtaaaagatgaaacctttggtgaatacagtgacagtgatgaaaagcctctcaaaggaagccttcggtcccttaatagggatatgcagcctactgaaagtgctgacagcttagtcgaatacggagagggagaccatggtctcttcagtgaagatggatcatttattggtgcctacgctggatctaaggagaagggatctgttgaaagcaatggaagttctacagcaacttttccccttcgggcataaacacaacatatgtaagcaacgctactggttcaccccaaccttccatatttatctgttcaaaggagcaagaactttcatataggaatagaaacatgctggccgaagatttcatccagaagtcaacatcctgcaattatgttgaaaagagtagtactttcttcaaaatataaaatgccaagcacttcaggcctatgttttgcttatattgttttcaggtgctcaaaatgcaaaacacaaaacaaatcctgcatttagatacacctcaactaaatccaaagtccccattcagtatattccatatttgcctgattttactattcggtgtgtttgcatagatgttgctacttggtgggtttttctccgtatgcacattggtatacagtctctgagaactggcttggtgactttgcttcactacaggttaaaagaccataagcaaactggttatttaaaatgtaaaaaggaatatgaaagtcttattaaaacacttcattgaaaatatacagtctaaatttattatttaaattttactagcaaaagtcttaggtgaacaatcaactagtatttgttgagctcctatttgcccagagatggtcatatttaaacagaagtatacgtttttcagtttcaacatgaatttttttatttctgtcagttatgacatccacaagcatcactttttgtgtctgttttttttttttttcttggactaaattcaactgcatggaagcggtggtcagaaggttgttttatacgagaacaggcagaaagtgcccattgttcaggattctaatagctacatctacttaatatcttcatttctaaattgactgcttttacctttttctcatgtttatataatggtatgcttgcatatatttcatgaatacattgtacatattatgttaatatttacacaatttaaaatatagatgtgttttattttgaagtgagaaaatgaacattaacaggcatgtttgtacagctagaatatattagtaagatactgtttttcgtcattccagagctacaactaataacacgaggttccaaagctgaagactttgtataaagtatttgggttttgttcttgtattgctttctttcaacagtttcaaaataaaatatcatataaatattgagggaaatgttttcatatttttcaaaataggtttttattgttgaatgtacatctaccccagcccctcaaaagaaaaactgtttacatagaaattcctacacatacgtttgcgtatatgttattttaaacatctttgtggtgagaattttttccccgatattctccttctgtcaaagtcagaacaaattcagggaatttattttctggcagttgtgctccagtccttttaaaattgtacatgaacatgttttagaaacaatatggaggatgatgcatacatgtcggtcaagttcagcgctcgacattttatggaaagatttttttaaccttaccacgaaatacttaactactgtttaagtgaattgacttatttcactttagtttttgaactgtgattattggtatactgttatatcctcaacttggatttatggtaaccccttatagttcatggagaccaaaatttggggtatttataatagtcagcgcaggaatgcacatggaatatctacttgtccttttgaacctcacgagtcatccagaatgtatagacaggaaaagcatgtcttatttaaaactgtaatttatgggctcaggatctgaccgcagtcccgggagtaagcatttcaaagggggaaggcagtgtggtccctaccctgtgtgaatgtgaggatgtagacatccatcagtgcaactcgagctccatcctcctccgatttctaaggttccagttttctggagggacagtcatcatgttttgatttatctgggagaaaactgtggtgcacagcttgtgaggagggcaaggttgtgacgttcgagcttagttctggtgttattctgtctcctcttctttgtcatcagccaaaacgtggtttttaaagagagtcatgcaggttagaaataatgtcaaaaatatttaggaatttaataacctttaagtcagaaactaaaacaaatactgaaatattagctcttcctacacttcgtgttcccctttagctgcctgaaaatcaagattgctcctgctcagatcttctgagtggctaaaacttatggatatgaaaaatgagattgaatgatgactatgctttgctatcattgttacctttcctcaatactatttggcaactactgggactcttcagcacaaaaggaatagatctatgattgaccctgattttaattgtgaaattatatgattcatatattttatgaatcagaataaccttcaaataaaataaatctaagtcggttaaaatggatttcatgattttccctcagaaaatgagtaacagagtccacggcgtgcaatggtaattataaattggtgatgcttgtttgcaaattgcccactcgtgataagtcaacagccaatatttaaaactttgttcgttactggctttaccctaactttctctagtctactgtcaatatcattttaatgtaattgattgtatatagtctcaagaatggttggtgggcatgagttcctagagaactgtccaagggttgggaaaatccaaattctcttcctggttccagcactgattttgtacataaacattaggcaggttgcttaacctttttatttcaaactctctcaactctaaagtgctaataataatctcagttaccttatctttgtcacagggtgttcttttttatgaagaaaaatttgaaaatgataaaagctaagatgccttctaacttcataagcaaacctttaactaattatgtatctgaaagtcacccccacataccaactcaacttttttcctgtgaacacataaatatatttttatagaaaaacaaatctacataaaataaatctactgtttagtgagcagtatgatttgtacatgccattgaaaattattaatcagaagaaaattaagcagggtctttgctatacaaaagtgttttccactaattttgcatgcgtatttataagaaaaatgtgaatttggtggttttattctatcggtataaaggcattgatattttagatgcacccgtgtttgtaaaaatgtagagcacaatggaattatgctggaagtctcaaataatatttttttcctattttatactcatggaagagataagctaaagaggggacaataatgagaaatgttggtgtgcttttctaagcatttaaaacataattgccaattgaaaccctaaatatgtttacataccattaagatatgattcatgtaacaatgttaaattaattataatgggattgggtttgttatctgtggtagtatatatcctagtgttcctatagtgaaataagtagggttcagccaaagctttctttgttttgtaccttaaattgttcgattacgtcatcaaaagagatgaaaggtatgtagaacaggttcacgtgattacctttttcttttggcttggattaatattcatagtagaactttataaaacgtgtttgtattgtaggtggtgtttgtattatgcttatgactatgtatggtttgaaaatattttcattatacatgaaattcaactttccaaataaaagttctacttcatgtaatccaaaaaaaaaaaaa

SEQ ID NO: 32 - DNA, 2732 bp, Homo sapiens
ggcgggaccggaacggagccgtgcggccccgcgcgctcgcagtctgtctcccgccgtccccacgcacgcgtcccggctcacgcgtccccccgcccgcccgcccgcccgcccgcccccgcttgtgccgcccctaccagagacccccaggagcaggatgtccttccagggcaagaaaagcatcccccggatcacgagtgaccgccttctgatcagaggtgggaggatcgtgaatgacgaccagtccttttacgctgatgtgcacgtggaagatggcttgataaaacaaatcggagaaaacctcatcgtccctgggggcatcaagaccattgacgcccacggcctgatggtccttcctggtggcgttgacgtccacacaaggctgcagatgcctgtcctgggcatgacaccggctgacgacttctgtcagggcaccaaggcagcgctagcaggaggaaccaccatgatcttggaccacgtcttccccgacacgggtgtgagcctgctggcggcctacgagcagtggcgggagcgggcggacagcgcggcctgctgcgactactccctgcacgtggacatcacccgatggcatgagagcatcaaggaggagctggaggccctggtcaaggagaagggtgtgaactccttcctggtcttcatggcatacaaggaccggtgccagtgcagcgacagccagatgtacgagatcttcagcatcatccgggacctgggggccttggcccaggtgcacgctgagaacggggacatcgtggaggaggagcagaagcggttgctggagctcggcatcactggccccgagggccacgtgctcagccaccccgaggaggtggaggctgaggcggtgtaccgagctgtcaccatcgccaagcaggcaaactgcccgctgtacgtcaccaaggtgatgagcaagggggcggccgacgccatcgctcaggccaagcgcagaggggtggtcgtgtttggggagcccatcaccgccagcctgggcaccgacggttcacactactggagcaagaactgggccaaggccgcagccttcgtcacatcaccccctgtcaacccagaccccaccacggcggaccacctcacctgcttgctgtccagcggggacctccaggtgacaggcagcgcccactgcaccttcaccactgcccagaaggctgtgggcaaggacaacttcgcgctgatccccgagggcaccaacggcattgaggagcgcatgtcgatggtctgggagaaatgtgtggcctctgggaagatggacgagaatgagttcgtcgcggtgaccagtacaaatgctgccaaaatcttcaatttttacccaaggaaggggcgagtggctgtgggctctgacgctgacctggtcatatggaaccccaaggccaccaagatcatctctgccaagacccacaatctgaacgtggagtacaacatcttcgagggagtggagtgccggggagcgcctgccgtggtcataagtcagggccgagtggcgctggaggacgggaagatgtttgtcaccccgggggcgggccgcttcgtccctcggaaaacattcccggactttgtctacaagaggatcaaagctcgcaacaggctggcggagatccacggtgtgccccgtggactgtatgacgggcccgtccacgaggtgatggtgcctgccaagccagggagtggcgctccggcccgcgcgtcctgcccaggcaagatctccgtccctcctgtgcgcaacctacatcagtcggggttcagcctatctgggtctcaggctgatgaccacatcgcccgacgcacagcacagaagatcatggcaccacctggcggccgctccaacatcacctctctctcctagacgcccaggaccggccctgtgagccgtgctggccccacccgaggccgcgggggccccagggcactcgcccccctccttagcattttcttttgtagaagtttctcgaaggtgcttggcggtcttgccttccccctccccacaggctctccttgtggggtcccaggtcctgctgccaagagcccctcaagagaagggctgaacctggggagatgtcactgccagggtgaggtggagccacatggcagggacaatgccggcagcctgagcccaggcaccccagtgcccgctgggcccagcctggggacagggaacctgccgggctcacagtgtgggagcagctggacaccaggcttcttggtgaaccggcgaggggccgagtcccgcctggtgggcatttgccgccgcctccccaccaccagtcactgcctcgcagagccctacactcccgcagccgctcctcagaggcctgtgcccatcgcaggcctgggaggaaagtgggcgcagagccctcctgctcacacagctgctgagacttcagggacccatcagaacttggtgcagcacagccccgcccgtggagggtcccttttacgcaccccaaggcccacacctaagcttccatgtagccctcatccagggaagttttgcgatcctttaggaagacactgtcctcttattacagattgtgtatttccgtaggcttcttagtagcagctttgtacactgaggacactgtagccaggaacctgtgcatgccacccaccgcctggacaggcagtcatcctgcctctgatgtgaatcaggcccattaaagacgtctgggtttgaagccgcctgtgcatggaaaaaaaaaaaaaaa

SEQ ID NO: 33 - DNA, 12317 bp, Homo sapiens
gtagcagccgcgccgccgcttcctcccgccggggccccggatgcactgagcggctgcggcgcggcttccatcctcccgccctcctgacgcggccggagcgcagccctgaggcccagggagaacgacacattggatacagaagggaggtgatcatgcaccatggcactggcccccagaacgtccagcatcagctgcagaggtccagggcctgccctggcagcgagggtgaggagcagccggcccaccccaacccacccccgtcccccgcagctcccttcgctccctcagcaagcccgtcggcaccccagtctcccagttatcaaatacagcagctgatgaataggagccctgcaaccgggcagaacgtgaacatcaccctgcagagcgtgggccctgtcgtcgggggaaaccagcagatcacactggccccactgccgctccccagccccacctctccaggcttccagttcagcgctcagcctcggcggtttgagcatgggtctccatcatacattcaggtcacgtcccccttgtcccagcaggtccagacccagagtcccacgcagcccagtccggggccggggcaggccttgcagaatgtgcgtgcaggtgcccctggccctgggctgggcctctgcagcagcagccctacagggggcttcgtggatgccagcgtgctggtgaggcagatcagcttgagcccctccagtggtggacactttgtgtttcaggatgggtcagggctcacccagatcgcccagggagcccaggttcagctccagcacccgggtacgcccatcacagtccgagagcggagaccctcccagccccacacacagtcagggggcaccatccaccacctgggaccccagagccctgcagccgcgggtggggccggcctgcagcccctggccagcccaagccacatcaccacggctaacttgccaccgcagatcagcagcatcatccagggccagctggttcagcagcagcaggtgctgcaggggccgccgctgccccggcccctgggcttcgagaggacacccggcgtgctgctccccggggctgggggcgcagcggggtttgggatgacgtccccacccccgcccaccagcccttccaggactgccgtgcccccaggcctttccagcctcccactcacgtctgtggggaacacgggaatgaagaaggttcccaagaagttagaggagattcccccagcctctccggagatggcacagatgaggaagcagtgcctggactatcattaccaggagatgcaggctctgaaggaggtcttcaaggagtatttgattgaactgtttttcttgcaacactttcaagggaacatgatggatttcttagctttcaagaagaaacattatgccccattacaagcatatcttaggcagaatgatttggacattgaagaagaggaggaggaggaggaagaggaggaagaaaaatctgaggttatcaatgacgagcagcaagccctcgcagggagcctggtagcaggggccggaagcacagtagagacggacctgtttaagaggcagcaggcgatgccctccacaggtatggcagagcagtctaagaggcctcgccttgaagtgggtcaccaaggggtagttttccagcacccaggggcggacgcaggcgttcctctccagcaactaatgccgaccgcacaaggaggaatgccccccacgccgcaggccgcgcagctcgctggacagaggcagagtcagcagcagtatgacccctccacggggcctcccgtgcagaacgctgccagcttgcacaccccactgccgcagctgcccgggaggctgcccccagccggtgttcccactgcagccctctcctctgcgctgcagtttgcacagcagccgcaagtggtagaggcccagacacagctccaaatcccggtgaagactcagcagcccaatgttcccatccctgcaccgcccagcagccaactccccatccctccctcgcagcctgcacagctggccctccacgttcccacacctggaaaggtgcaggtgcaggcctctcagctttcctccctgccacagatggtagcatcgacaaggctccctgtggaccctgccccgccctgcccacggcctctgcccacctcttctacctcgtccctcgcgcctgtgagtggctccggcccaggaccctcccctgctcgatcctctccagtaaatagaccttcctcagccaccaataaggcactatctccagtcacttcccggaccccaggggtggtggcatctgcccccaccaaaccacagagtcctgctcagaatgccacctcgtcccaagacagttctcaggatacgctgacagaacaaataactctggagaaccaggtgcatcagcgcattgcggagctgaggaaagcaggtctgtggtcccagaggcgtctgccaaagctgcaggaggccccacgccccaagtcccactgggactatctgctggaggagatgcagtggatggccacagactttgcccaggagaggaggtggaaggtggctgctgcgaagaagctcgttagaactgtggtgcgccatcacgaggagaagcagctccgtgaagaaagggggaagaaggaagagcagagcagactgaggcggatagccgcctccacggcccgggagatagagtgcttttggtcgaatattgaacaggttgtggaaataaaactacgagtagaattagaagaaaaaaggaagaaggccttaaatttacagaaagtttccaggagagggaaagaattgagacctaaaggatttgacgcattacaggaaagttctctggattcaggaatgtctggaagaaaaagaaaagctagcatatctttgactgatgacgaagtggacgatgaagaggaaacaattgaagaggaggaagcaaatgaaggcgttgtggaccaccaaacagaactttctaatttagccaaggaagctgagctgcccctcctggacctgatgaagctgtacgaaggcgccttcctgccgagttctcagtggccccggccgaagcctgatggggaggacacaagcggagaggaagatgcagatgactgtccaggcgacagggagagtcgcaaggacttggttctcatcgactcgcttttcatcatggatcagttcaaagctgccgagaggatgaatatcgggaagccaaacgccaaggacattgcggacgtcactgcggtggctgaagccatcctgccgaagggcagtgctcgggtcacaacctcggtcaagtttaatgctccatctttgttgtatggggctctcagagattatcagaagattggcctggactggctggccaaactttacaggaagaatctcaatggcatattggcagatgaagctgggctgggtaaaacagtgcagatcattgctttttttgcccacctagcttgtaacgaaggtaattggggcccccatcttgttgttgtgagaagttgtaacatactcaagtgggagcttgaattgaaacgttggtgtcccggactcaaaatcctctcatatattggcagccacagagaactcaaagcaaagagacaggagtgggccgaacccaacagcttccacgtctgcatcacgtcctacactcagttcttccggggcctcaccgccttcacacgagtgcgctggaagtgcctggtcattgatgagatgcagcgcgtgaagggcatgaccgagaggcactgggaagcggttttcaccctgcagagccaacaacgtctgcttctgatcgactcgccgctgcacaataccttcctggagctctggaccatggtgcacttcctggtcccagggatctccaggccctacctgagctcccctctgagggcccccagtgaagagagccaggattactaccataaagtggtcataaggttacacagggtgacacagccatttattttgaggagaactaagagagatgtggaaaagcaactaacaaagaaatatgagcatgttttgaagtgtcgcctttctaaccgacaaaaagccttatacgaggacgttatcctgcaacctggcactcaggaggccttgaagagcgggcactttgtcaacgtcctgagcatccttgtgcggctgcagcgcatctgcaaccaccctgggctcgtcgagccccggcacccaggctcttcctacgtggcggggccactggagtatccgtccgcatctctaatcctgaaggcactggagagagatttctggaaggaagcagatctttctatgtttgatctcatcggcttagaaaataaaatcactcgtcacgaggcagagttgctgtctaagaaaaagataccgcggaaactcatggaggaaatctccacttcagcagccccagcagcccgaccagcagcagcaaagctgaaggccagcaggttgtttcagcctgtgcagtatggccagaagcccgagggtcgcaccgtggctttccccagcactcacccgccccggacggcagcccccaccacggcctctgctgctccacagggcccgcttcgaggacggccgcccatcgccacgttctctgccaatccggaggcaaaagcagcagcagccccgtttcagacctctcaggcttccgccagtgctccacgacaccagcccgcctcggcctccagcacagccgctagcccggcccatcctgcgaaactgcgggcccagaccacagcacaggcctccaccccaggccagcccccgccccagccccaggccccctcgcacgcggccgggcagagcgcgctgcctcagaggctggtgctcccctcgcaggcccaggcccgcttgcccagtggagaggtagtgaaaatagctcagctggcatccatcacaggaccacagagccgcgtggctcagccagagacgccggtgacactgcagttccagggcagcaagttcaccctgtcacacagccagctccggcagctcacagcgggccagccgctgcagctgcaaggcagcgtcctccagatcgtgtccgcccccgggcagccctaccttcgagcccctggccctgtggtgatgcagaccgtgtctcaggcgggcgctgtgcacggcgccctgggaagcaagcccccggccggcggtcccagccctgcacccttgaccccacaagttggcgttccgggccgcgtggcggtgaatgccttggctgtaggagaacccggaacggcctccaaaccagcttctcccattggagggccgacccaggaggaaaagaccagactcttgaaagagcgcctggatcagatttatttagtcaacgagcggcgctgttctcaagctccagtctatggcagagacttgctaaggatttgtgccctgcctagccatggaagggtacagtggcgtgggtccctggatggccgtcgtgggaaggaggccgggccagcgcacagttacacttcatcctcagaaagtccaagtgagctgatgttgacgctttgtcggtgtggagagtctctgcaggatgttattgacagggtggcctttgtgattcctccggtggtggcagcacccccgtccctacgggtgccgcggccgccacccctgtacagccacagaatgaggatcttgaggcagggcctgagagagcacgctgcgccgtacttccagcagctgcggcagaccacggctccacgcctgctgcagttccctgagctgaggctggtgcagttcgactcagggaagttggaagctttagctatcttgcttcagaaattgaaatctgaaggacgtcgggtgctgattttatcacagatgattcttatgttggacattttagagatgttcttgaacttccattacctcacctatgtaagaatcgatgaaaatgccagcagtgagcaacggcaggaactgatgaggagtttcaacagagacaggcggattttttgtgccattctctccactcacagccgtaccacaggtataaaccttgtagaggcggacaccgtcgtgttttatgacaatgacctgaatccagtgatggatgccaaagctcaggagtggtgcgataggatcgggagatgcaaagacatccacatatacaggcttgtgagtggcaattccattgaagagaaattgttgaaaaatggaactaaagatctgatccgagaagtggctgctcagggaaatgactactccatggctttcttaactcagcgaaccatccaggagctgtttgaagtttattctcccatggatgatgctggcttcccggtcaaagctgaggagtttgtggtgctttctcaggaaccttctgtcacggaaaccattgcacccaaaattgcaagacctttcatagaggccctcaagagtattgagtatctggaggaggatgcccagaagtccgcacaggagggggtgctgggaccacacactgatgctctgtcatcagactctgagaacatgccgtgtgatgaagaaccatcccaattagaggagctagctgacttcatggagcagcttacaccaattgaaaaatatgctttaaattacctggaattattccatacttctattgagcaagaaaaggagagaaacagtgaggacgcagtgatgactgcagtgagggcatgggagttctggaacctgaagaccctgcaggagagggaggcccggctgcggctggagcaggaggaggcggagctcctgacctacacgcgagaggatgcctacagcatggagtatgtctacgaagatgtcgatgggcagacagaagtcatgccgctctggaccccacccaccccgccgcaggacgacagcgacatctacctcgactcggtcatgtgtctcatgtatgaagccactcccatcccagaggctaagctgccccctgtgtacgtgaggaaggagcggaagcgacacaaaacagacccctcagctgcaggcaggaagaagaagcagcgtcacggggaggcggtcgtccctcctcggtccctgtttgaccgcgcaacaccaggacttctgaaaattcgcagagagggcaaggagcagaagaagaatattctgctgaagcagcaggtgccattcgccaagcccctgccaacttttgccaaacccacagctgagcctggtcaagacaaccccgagtggctcatcagtgaggactgggcgctgctgcaggctgtaaagcagttactggagctgcctttgaacctcacaatcgtgtcacctgctcacacacctaattgggatcttgtcagtgacgttgttaactcctgtagccgaatctaccgctcttccaaacagtgccggaatcgctacgagaatgtcatcattccacgagaggaggggaagagtaaaaacaaccgtcctctccgtacgagccagatctatgcccaggatgagaatgccacacacacccagctgtacacgagccactttgacttaatgaaaatgactgctggcaagaggagtcccccaatcaaacctctgcttggcatgaatccctttcagaagaaccccaagcacgcgtctgtgttggcagaaagtggaatcaactatgacaagccgctgcctcccatccaggtggcatctctccgtgcagagcgaatcgcaaaagagaaaaaggctctggctgatcagcagaaggcacagcagccggccgtggcccagccacccccgccccagccgcagcccccaccacccccgcagcagccaccgccaccgctgccacaaccacaggcagcgggcagccagccgccagcagggccaccagctgtccagccccaaccccagccacagccccagacccagccacagcctgtgcaggccccagcgaaggcgcagcccgcaatcacgacggggggcagtgcagccgtactggcaggaaccattaaaacatcagttactgggacgagcatgcccactggtgccgtgagtggaaatgtgatcgtgaacaccatcgcaggggtcccagctgccaccttccagtccatcaacaagcgcctggcgtcgccagtggctcctggggccttgactacgccgggaggctctgctcccgcccaggtggtgcacacccagcccccgccacgggcagtcggctccccagccacggcgacccctgacctggtgtccatggcaacgactcagggtgttcgagcggtcacttctgtgacagcctcggccgtggtcactaccaacctgaccccagtgcagaccccggcacggtctttggtgccccaagtgtcccaagccacaggagttcagctccctggaaaaaccatcacacctgcacatttccagcttctcaggcagcagcagcagcagcagcaacaacagcagcagcagcagcagcagcagcagcagcagcagcagcagcaacagcagcagcagcaacagacgacgacgacctctcaggtgcaagttccacagatccagggccaggcccagtccccagcacagatcaaagctgtgggcaagctgacgccggaacacctcatcaaaatgcagaagcagaaactgcagatgcccccgcagcccccaccgccacaggcccagtctgcgcccccgcagccaacagcccaagtgcaagtgcagacctcgcagccgccgcagcagcagagcccccagctcacgacggtcacggccccaaggcctggtgccctgctgacgggcaccaccgtggccaacctccaggtggcccggctcacccgggttcccacttctcagctgcaggcgcaagggcagatgcagacccaggcaccccagccagcccaggtggccttggcgaagcctccggtggtgtccgtcccggcagctgtggtctcctcaccgggagtcaccaccctgcccatgaacgtcgcggggatcagcgtggcgatcggtcagccacagaaggcagcaggacagaccgtggtggcccagcccgtgcacatgcagcagctgctgaagctgaagcagcaggccgtccagcagcagaaggccatccagccccaggctgcacagggcccggcagccgtccagcagaagatcaccgcacagcagatcaccacccctggcgcgcagcagaaggttgcctacgccgcgcagccggcccttaagacccagtttcttaccacacccatctcccaggcccagaaactggccggggcccagcaagtgcagacccagatccaggttgcaaaacttcctcaagttgttcaacagcaaacacccgtggccagcatccagcaagttgcctctgcttcccagcaggcttctccacagactgtggcgctcacgcaggcgacggcggccgggcagcaggtgcagatgatccctgcagtgaccgcgactgcccaggtggttcagcagaaactcattcagcagcaggtggtgaccacggcgtcggccccgctccagactccaggcgctcccaacccagcccaggtgcccgccagctccgacagcccaagccagcagcccaagttacagatgagggtccctgctgtcaggctaaagacacctactaagcctccgtgccagtagtcagggcagcagggctgcctctcatctaaagcaaaactaccttcctcacagaaaacgctttattagtgaaccttgggaccatgtcacgcaagagattcagcactgggaaagatataattgaaacaaaatagtgtaatcattttattaaaatgcatcccacactgcaggacaaatggtccttatggagtgccgcgttctctgtactacgtggctcatggaaaaagtgacaacatggcttcctctaaatcatttcacctttcagtccccacccgcacccgtcccctagagccatagtactgtgttctgaaagccatttagaatttctttgtgagcatgtagtgctttgcacgccacagaagccgtctgccgtgtgtgaggagcatacaatggactttctaaagataaggcgtgggcttccacagtgtctgccagagtttagttctttataccttactgaaaaatgcctcgtggtcttcgcagaggggaaggcctgtctaaagtcaatcatccgagatgggttttccattccaaagaaaggcaatatggttccttccttccctcctaaaatatgacttaacttttaagagaaatgttctgacacccacctaaacacacaaggcacgttcctggcctgtgttcaagggaaatgatcagtcattgcattgttattccaaagagcagccaacagtggcctcccccaggccctaccctgcaatgggattcgctttcatttaatggaaacttctgggactgatgcccaactcagtgcactcaagacgcatctccagttttcgggggaagctggtatttgacatagtgtgttaaacagctcctgagaacctttgggacactctgccatggctggcgtgaggcccagaggaccacgcagaggcaatggtagtacagatgtcacagctgagggtacgatgaggcctgggctcagtgagccaggacgaatgtgacagacaccccttgctgccacagtcagccctttgacgaaggtgggctggtgattctggaagtattggctatagcggtgggcccagtcaactcttccttgtggacttacgacagcagattttctctaggataagcttgtgtggttctgccagtgaagcagagaaccacctgtgctgttgtggaaggcgtgccgttgagggggaaaacgaagcccagtatttgctactgtttttcctttttttactatgacaggaaaataaatgcaattttagtggaattgattgacagtgtctccttactttgaagttttcaccaaagcaaaaaggtccatatccaatagtatcctttgtgctgtggcttgattttggcctattttacattatttggtccaggaaattaggttatattaggttttttgtatactaaaaatcagttatggcacaataaagattttctgtttttaaattgtatttcatctgcttcctccccattctctcactttaagtgacattgaggaaggtattctgtcccacaggtttctgtggacagcgatacagcaggagtcagtgaaatcaactggggagctcacttgagctcttgataagaaatgtggagaaaagtaaaaaccaagctttgaagaaacagaagaaattaatcttttagttagttgaacataccaaagcagaggactggaatctgtttgttctaaccaacccgttctccctggcttggcacgtgccgtgagagcgcagcttgccggagggagggccgctgtgtgcgcctcacatctggctcccagtggaaacttttactcctcctcatccgcagatgtgatagaactgaagtatctaggaattctgcctttgtcatttgttttaatttgtgtgccctgttcattttttttgtctttcccaaatcttggtagtctccttatagttgaagataaaatgttgagtgcacttattttagaatatcctagacataactgtctaagtaaaagcgctctattaatctaaaacactacaagagaatttaacaccatctctcaaatgcttttttggagagcttaatgggattctgaatatttgcaatgtggagtttccgccccgatctcacgtcagtgagggtctcctgtctctcaagtgtgtttcctttggctgttccctaatacaaaacacggacatatttttactcgtagcactcaatttagtaacttctagatgctaccgttgacctgagttaaattcatttagtcgtgtacgtaaaaactctccttttagtgtgttattttcttggccttcccttttaaaggttaaagtttctaacctaagaattaagtacgcgttcaggaagctgttgtctaggccttccccttgtgaatctgggttcattccaatacggcaagtaagagttggaaactttgagaacacagactataaaggcagcagcccgaacactgtcagactctaattggcgaccctgggaaacagttgccctgctattctttaaagaaagacgtttattctgatgataaaaacagttagccagactgtttttaaagcacctggcgggaagcagaaggttggatccaagcccttgttcagatttggtgcctgataagacaggggtttctctttttgtgacctttattattattattttgttaactgttgtaaccagttagctgttgtgttttaagatagaaaggaacaagactaaaattgtaaatactttgtaaacatcagcatttgtacttgaatagtaggattttaaagggcattgatagcataccaaacaaaaggcaaaataaagtgacctttttatatatttttt

SEQ ID NO: 34 - DNA, 6712 bp, Homo sapiens
agttttgtttttttttttttcggcggagatcctcgttggggctgggaaactcctgcaaaactcgagaccaggaagccagcccgcaccccaacccccaccaaagccacctactcttcttctgtgggaggccagtccacatccgctctcacccgagagagatattcagctggatccaaagtgactgatgaagggaaggaaatcatgtcaagcgaagccttgaaaaagctgccctgagacggtgtcccgccgaaagaatgttggctcaattaagaaacatcagggagataaattcaacccagtgtgtctaaaaatgactacaaaacgaagtttgtttgtgcggttggtaccatgtcgctgtctacgaggggaagaggagactgtcactactcttgattattctcattgcagcttagaacaagttccgaaagagatttttacttttgaaaaaaccttggaggaactctatttagatgctaatcagattgaagagcttccaaagcaactttttaactgtcagtctttacacaaactgagtttgccagacaatgatttaacaacgttaccagcatccattgcaaaccttattaatctcagggaactggatgtcagcaagaatggaatacaggagtttccagaaaatataaaaaattgtaaagttttgacaattgtggaggccagtgtaaaccctatttccaagctccctgatggattttctcagctgttaaacctaacccagttgtatctgaatgatgcttttcttgagttcttgccagcaaattttggcagattaactaaactccaaatattagagcttagagaaaaccagttaaaaatgttgcctaaaactatgaatagactgacccagctggaaagactggatttgggaagtaacgaattcacggaagtgcctgaagtacttgagcaactaagtggattgaaagagttttggatggatgctaatagactgacttttattccagggtttattggtagtttgaaacagctcacatatttggatgtttctaaaaataatattgaaatggttgaagaaggaatttcaacatgtgaaaaccttcaagacctcctattatcaagcaattcacttcagcagcttcctgagactattggttcgttgaagaatataacaacgcttaaaatagatgaaaaccagttaatgtatctgccagactctataggagggttaatatcagtagaagaactggattgtagtttcaatgaagttgaagctttgccttcatctattgggcagcttactaacttaagaacttttgctgctgatcataattacttacagcagttgcccccagagattggaagctggaaaaatataactgtgctgtttctccattccaataaacttgagacacttccagaggaaatgggtgatatgcaaaaattaaaagtcattaatttaagtgataatagattaaagaatttaccctttagctttacaaagctacagcaattgacagctatgtggctctcagataatcagtccaaacccctgatacctcttcaaaaagaaactgattcagagacccagaaaatggtgcttaccaactacatgttccctcaacagccaaggactgaggatgttatgtttatatcagataatgaaagttttaacccttcattgtgggaggaacagaggaaacagcgggctcaagttgcatttgaatgtgatgaagacaaagatgaaagggaggcacctcccagggagggaaatttaaaaagatatccaacaccatacccagatgagcttaagaatatggtcaaaactgttcaaaccattgtacatagattaaaagatgaagagaccaatgaagactcaggaagagatttgaaaccacatgaagatcaacaagatataaataaagatgtgggtgtgaagacctcagaaagtactactacagtaaaaagcaaagttgatgaaagagaaaaatatatgataggaaactctgtacagaagatcagtgaacctgaagctgagattagtcctgggagtttaccagtgactgcaaatatgaaagcctctgagaacttgaagcatattgttaaccatgatgatgtttttgaggaatctgaagaactttcttctgatgaagagatgaaaatggcggagatgcgaccaccattaattgaaacctctattaaccagccaaaagtcgtagcacttagtaataacaaaaaagatgatacaaaggaaacagattctttatcagatgaagttacacacaatagcaatcagaataacagcaattgttcttctccatctcggatgtctgattcagtttctcttaatactgatagtagtcaagacacctcactctgctctccagtgaaacaaactcatattgatattaattccaaaatcaggcaagaagatgaaaattttaacagccttttacaaaatggagatattttaaacagttcaacagaggaaaagttcaaagctcatgataaaaaagattttaacttacctgaatatgatttgaatgttgaagagcgattagttctaattgagaaaagtgttgactcaacagccacagctgatgacactcacaaattagatcatatcaatatgaatcttaataaacttataactaatgatacatttcaaccagagatcatggaaagatcaaaaacacaggatattgtgcttggaacaagctttttaagcattaattctaaagaggaaactgagcacttggaaaatggaaacaagtatcctaatttggaatccgtaaataaggtaaatggacattctgaggaaacttcccagtctcctaataggactgaaccacatgacagtgattgttctgttgacttaggtatttccaaaagcactgaagatctctcccctcagaaaagtggtccagttggatctgttgtgaaatctcatagcataactaatatggagattggagggctaaaaatctatgatattcttagtgataatggacctcagcagccaagtacaaccgttaaaatcacatctgctgttgatggaaaaaatatagtcaggagcaagtctgccacactgttgtatgatcaaccattgcaggtatttactggttcttcctcatcttctgatttaatatcaggaacaaaggcaattttcaagtttgattcaaatcataatcccgaagagccaaatataataagaggccccacaagtggcccacaatctgcacctcaaatatatggtcctccacagtataatatccaatacagtagcagtgctgcagtcaaagacactttgtggcactccaaacaaaatccccaaatagaccatgccagttttcctcctcagctccttcctagatcagagagcacagaaaatcaaagttatgctaaacattctgccaatatgaatttctctaatcataacaatgttcgagctaatactgcataccatttacatcagagacttggcccagcaagacatggggaaatgtgggccatctcaccaaacgaccgacttattcctgcagtaactcgaagtacaatccagcgacaaagtagtgtgtcctccacagcctctgtaaatcttggtgatccaggctctacaaggcgggctcagattcctgaaggagattatttatcatacagagagttccactcagcgggaagaactcctccaatgatgccaggatcacagagacccctttctgcacgaacatacagcatagatggtccaaatgcatcaagacctcagagtgctcgaccctctattaatgaaataccagagagaactatgtcagttagtgatttcaattattcacggactagtccttcaaaaagaccaaatgcaagggttggttctgagcattctttattagatcctccaggaaaaagtaaagttcctcgtgactggagagaacaagtacttcgacatattgaagccaaaaagttagaaaagattcgagtgagggttgaaaaggatccagaacttggatttagcatatcaggtggtgtcgggggtagaggaaacccattcagacctgatgatgatggtatatttgtaacaagggtacaacctgaaggaccagcatcaaaattactgcagccaggtgataaaattattcaggctaatggctacagttttataaatattgaacatggacaagcagtgtccttgctaaaaactttccagaatacagttgaactcatcattgtacgagaagtttcctcataagcactgtggacaaaaaaagcggggaagacagcaagatttattggaagatacttacaggggaaattaatattttgactatttttatatataaagaagaactcaaaaaattatgttcaaatttgtacattaatgaaataatggaacttgtggttagagggaaagaaccactgtacagaatataaaggagactgttgaattcataccatataaaacttgttaggtttttaaacatagcaatcaaggctacaaaaacaaacctgtgttgtttttgtatagattgtaggtttatttttggatttcatatacatgactgaactgtgtgcaaggcaatagttagccttgattttagcccagagacagatggcagagctatctctctcatagcttttatgcccttatttttattcaactggtattaatgtttttctcctgaaactactttttttgatgtgggcaagagatttgaagtgttggcttttgctatgtgcatattgaattgaagagtgagtaggtgaaggtggtgctggtgggttcactttccaaggccagactaaaacagttattttctataaaaatctggaagcaaagaatggggatggggagagctacgtggtagtatgtttttattaggagaataatgcaataaaatatgtaatgtcttttttataaagcaaaaaagacaataattgcatttatgagctcggcaggatctgttcttgtcatagccattgactatacatttgctactggtgattcagtttttaattttttagtcacaggaaatttttaactctactgtagatgcatgtccatgcattttctgtgttatggaaatccactgatttttttttttttttcaaatggtggtacttgcaatctgttttataattagtgctccatttaaatctaatttataatttttattttaagcagcaaatgaaacaaaaatggccagttttaagattgtgttgcctgtaacacaaaatgttacgaaggtttaggaaagcctctttgatttttgtttggccttgcattgccttggtaaagtaaaaggaaacagtacacttggagctaggaaaccaaagcaagctttgtgaaactggcacagtgatagagaattgctgtggagagttatagagcaaagggatgggtccttgaggcctgccagtgtgtaaaggtgttcaaataaagggctgtttctacaggtaacattaaatgtgaactcaacacttccagagtctttaaagggtttctatgtgtatcagtgtaatagtgttttaccaccaactgcctttctttgttcctagttactgtaacaaatatttgatgatagaggtttattaattttgtttatccagaccattaattttatttgtttttgttctatgtaatcaaataaaatttgagtaacatgtaatggtaaggattaatgcatggttatttggaccagaaaaaagtgccatagaagaccaataactgtttagttgaggctagtctggaacctttcattagagcaatatttggttattgcacttcatttttatttactaagaaatgcaatttgggaatttttaatctgttatgctttgtttatcaaccttgattttaattaagacttttataagactagcttaaaacaccaaccaacattatttttgcaaaagtgagttggactcactttccattcttgctagtcagagtaagtaggcagcacttttaaaaatatgtgaactcaaatattgcacttctttcaagatgttatcaattggttattgtactgtatagttttaataattttgattgaaaccctttaacaactctttgtaaattttaactcattttagttgattttcagtactatttacataggaattgatttttatggatatagtagaagaaatgtgctgtattttgataaaattcacttattgtatgtgtgttgtaatctaaaaaaaaaaagaatgacaaacagcttctttaagacaagtctcggtgttccctttattcttagtttgtttttaaatattaattttggcattctaaaatagctaacatttcttttattgatttcagattttcacaggcacattctacttttaatcagaaatatatttaataagtataattgtgaagttttcaactactttaccttgaaccacatataccaattataattttggaaaaggaattaagcctcacggaacaatggatcttcagcaaaccttaacttcattgtctgcacattacattgaagtattataaatgcaacagatgttatatgcactggcattttatcctactctagttagttaaaattttatagtattcttgcaacacataaagttgcgtaagaaactttaccaagaggagtattatagccaagttttctttgaaagtattggaaaactaaaattaaatgacaaggactttgaattagaattttgctgtaataaagtttcaaaatttgaataaaataattaaattttttgagga

SEQ ID NO: 35 - DNA, 8449 bp, Homo sapiens
gcccgcgccggctgtgctgcacagggggaggagagggaaccccaggcgcgagcgggaagaggggacctgcagccacaacttctctggtcctctgcatcccttctgtccctccacccgtccccttccccaccctctggcccccaccttcttggaggcgacaacccccgggaggcattagaagggatttttcccgcaggttgcgaagggaagcaaacttggtggcaacttgcctcccggtgcgggcgtctctcccccaccgtctcaacatgcttaggggtccggggcccgggctgctgctgctggccgtccagtgcctggggacagcggtgccctccacgggagcctcgaagagcaagaggcaggctcagcaaatggttcagccccagtccccggtggctgtcagtcaaagcaagcccggttgttatgacaatggaaaacactatcagataaatcaacagtgggagcggacctacctaggcaatgcgttggtttgtacttgttatggaggaagccgaggttttaactgcgagagtaaacctgaagctgaagagacttgctttgacaagtacactgggaacacttaccgagtgggtgacacttatgagcgtcctaaagactccatgatctgggactgtacctgcatcggggctgggcgagggagaataagctgtaccatcgcaaaccgctgccatgaagggggtcagtcctacaagattggtgacacctggaggagaccacatgagactggtggttacatgttagagtgtgtgtgtcttggtaatggaaaaggagaatggacctgcaagcccatagctgagaagtgttttgatcatgctgctgggacttcctatgtggtcggagaaacgtgggagaagccctaccaaggctggatgatggtagattgtacttgcctgggagaaggcagcggacgcatcacttgcacttctagaaatagatgcaacgatcaggacacaaggacatcctatagaattggagacacctggagcaagaaggataatcgaggaaacctgctccagtgcatctgcacaggcaacggccgaggagagtggaagtgtgagaggcacacctctgtgcagaccacatcgagcggatctggccccttcaccgatgttcgtgcagctgtttaccaaccgcagcctcacccccagcctcctccctatggccactgtgtcacagacagtggtgtggtctactctgtggggatgcagtggctgaagacacaaggaaataagcaaatgctttgcacgtgcctgggcaacggagtcagctgccaagagacagctgtaacccagacttacggtggcaactcaaatggagagccatgtgtcttaccattcacctacaatggcaggacgttctactcctgcaccacagaagggcgacaggacggacatctttggtgcagcacaacttcgaattatgagcaggaccagaaatactctttctgcacagaccacactgttttggttcagactcgaggaggaaattccaatggtgccttgtgccacttccccttcctatacaacaaccacaattacactgattgcacttctgagggcagaagagacaacatgaagtggtgtgggaccacacagaactatgatgccgaccagaagtttgggttctgccccatggctgcccacgaggaaatctgcacaaccaatgaaggggtcatgtaccgcattggagatcagtgggataagcagcatgacatgggtcacatgatgaggtgcacgtgtgttgggaatggtcgtggggaatggacatgcattgcctactcgcagcttcgagatcagtgcattgttgatgacatcacttacaatgtgaacgacacattccacaagcgtcatgaagaggggcacatgctgaactgtacatgcttcggtcagggtcggggcaggtggaagtgtgatcccgtcgaccaatgccaggattcagagactgggacgttttatcaaattggagattcatgggagaagtatgtgcatggtgtcagataccagtgctactgctatggccgtggcattggggagtggcattgccaacctttacagacctatccaagctcaagtggtcctgtcgaagtatttatcactgagactccgagtcagcccaactcccaccccatccagtggaatgcaccacagccatctcacatttccaagtacattctcaggtggagacctaaaaattctgtaggccgttggaaggaagctaccataccaggccacttaaactcctacaccatcaaaggcctgaagcctggtgtggtatacgagggccagctcatcagcatccagcagtacggccaccaagaagtgactcgctttgacttcaccaccaccagcaccagcacacctgtgaccagcaacaccgtgacaggagagacgactcccttttctcctcttgtggccacttctgaatctgtgaccgaaatcacagccagtagctttgtggtctcctgggtctcagcttccgacaccgtgtcgggattccgggtggaatatgagctgagtgaggagggagatgagccacagtacctggatcttccaagcacagccacttctgtgaacatccctgacctgcttcctggccgaaaatacattgtaaatgtctatcagatatctgaggatggggagcagagtttgatcctgtctacttcacaaacaacagcgcctgatgcccctcctgacccgactgtggaccaagttgatgacacctcaattgttgttcgctggagcagaccccaggctcccatcacagggtacagaatagtctattcgccatcagtagaaggtagcagcacagaactcaaccttcctgaaactgcaaactccgtcaccctcagtgacttgcaacctggtgttcagtataacatcactatctatgctgtggaagaaaatcaagaaagtacacctgttgtcattcaacaagaaaccactggcaccccacgctcagatacagtgccctctcccagggacctgcagtttgtggaagtgacagacgtgaaggtcaccatcatgtggacaccgcctgagagtgcagtgaccggctaccgtgtggatgtgatccccgtcaacctgcctggcgagcacgggcagaggctgcccatcagcaggaacacctttgcagaagtcaccgggctgtcccctggggtcacctattacttcaaagtctttgcagtgagccatgggagggagagcaagcctctgactgctcaacagacaaccaaactggatgctcccactaacctccagtttgtcaatgaaactgattctactgtcctggtgagatggactccacctcgggcccagataacaggataccgactgaccgtgggccttacccgaagaggacagcccaggcagtacaatgtgggtccctctgtctccaagtacccactgaggaatctgcagcctgcatctgagtacaccgtatccctcgtggccataaagggcaaccaagagagccccaaagccactggagtctttaccacactgcagcctgggagctctattccaccttacaacaccgaggtgactgagaccaccattgtgatcacatggacgcctgctccaagaattggttttaagctgggtgtacgaccaagccagggaggagaggcaccacgagaagtgacttcagactcaggaagcatcgttgtgtccggcttgactccaggagtagaatacgtctacaccatccaagtcctgagagatggacaggaaagagatgcgccaattgtaaacaaagtggtgacaccattgtctccaccaacaaacttgcatctggaggcaaaccctgacactggagtgctcacagtctcctgggagaggagcaccaccccagacattactggttatagaattaccacaacccctacaaacggccagcagggaaattctttggaagaagtggtccatgctgatcagagctcctgcacttttgataacctgagtcccggcctggagtacaatgtcagtgtttacactgtcaaggatgacaaggaaagtgtccctatctctgataccatcatcccagctgttcctcctcccactgacctgcgattcaccaacattggtccagacaccatgcgtgtcacctgggctccacccccatccattgatttaaccaacttcctggtgcgttactcacctgtgaaaaatgaggaagatgttgcagagttgtcaatttctccttcagacaatgcagtggtcttaacaaatctcctgcctggtacagaatatgtagtgagtgtctccagtgtctacgaacaacatgagagcacacctcttagaggaagacagaaaacaggtcttgattccccaactggcattgacttttctgatattactgccaactcttttactgtgcactggattgctcctcgagccaccatcactggctacaggatccgccatcatcccgagcacttcagtgggagacctcgagaagatcgggtgccccactctcggaattccatcaccctcaccaacctcactccaggcacagagtatgtggtcagcatcgttgctcttaatggcagagaggaaagtcccttattgattggccaacaatcaacagtttctgatgttccgagggacctggaagttgttgctgcgacccccaccagcctactgatcagctgggatgctcctgctgtcacagtgagatattacaggatcacttacggagagacaggaggaaatagccctgtccaggagttcactgtgcctgggagcaagtctacagctaccatcagcggccttaaacctggagttgattataccatcactgtgtatgctgtcactggccgtggagacagccccgcaagcagcaagccaatttccattaattaccgaacagaaattgacaaaccatcccagatgcaagtgaccgatgttcaggacaacagcattagtgtcaagtggctgccttcaagttcccctgttactggttacagagtaaccaccactcccaaaaatggaccaggaccaacaaaaactaaaactgcaggtccagatcaaacagaaatgactattgaaggcttgcagcccacagtggagtatgtggttagtgtctatgctcagaatccaagcggagagagtcagcctctggttcagactgcagtaaccaacattgatcgccctaaaggactggcattcactgatgtggatgtcgattccatcaaaattgcttgggaaagcccacaggggcaagtttccaggtacagggtgacctactcgagccctgaggatggaatccatgagctattccctgcacctgatggtgaagaagacactgcagagctgcaaggcctcagaccgggttctgagtacacagtcagtgtggttgccttgcacgatgatatggagagccagcccctgattggaacccagtccacagctattcctgcaccaactgacctgaagttcactcaggtcacacccacaagcctgagcgcccagtggacaccacccaatgttcagctcactggatatcgagtgcgggtgacccccaaggagaagaccggaccaatgaaagaaatcaaccttgctcctgacagctcatccgtggttgtatcaggacttatggtggccaccaaatatgaagtgagtgtctatgctcttaaggacactttgacaagcagaccagctcagggagttgtcaccactctggagaatgtcagcccaccaagaagggctcgtgtgacagatgctactgagaccaccatcaccattagctggagaaccaagactgagacgatcactggcttccaagttgatgccgttccagccaatggccagactccaatccagagaaccatcaagccagatgtcagaagctacaccatcacaggtttacaaccaggcactgactacaagatctacctgtacaccttgaatgacaatgctcggagctcccctgtggtcatcgacgcctccactgccattgatgcaccatccaacctgcgtttcctggccaccacacccaattccttgctggtatcatggcagccgccacgtgccaggattaccggctacatcatcaagtatgagaagcctgggtctcctcccagagaagtggtccctcggccccgccctggtgtcacagaggctactattactggcctggaaccgggaaccgaatatacaatttatgtcattgccctgaagaataatcagaagagcgagcccctgattggaaggaaaaagacagacgagcttccccaactggtaacccttccacaccccaatcttcatggaccagagatcttggatgttccttccacagttcaaaagacccctttcgtcacccaccctgggtatgacactggaaatggtattcagcttcctggcacttctggtcagcaacccagtgttgggcaacaaatgatctttgaggaacatggttttaggcggaccacaccgcccacaacggccacccccataaggcataggccaagaccatacccgccgaatgtaggacaagaagctctctctcagacaaccatctcatgggccccattccaggacacttctgagtacatcatttcatgtcatcctgttggcactgatgaagaacccttacagttcagggttcctggaacttctaccagtgccactctgacaggcctcaccagaggtgccacctacaacatcatagtggaggcactgaaagaccagcagaggcataaggttcgggaagaggttgttaccgtgggcaactctgtcaacgaaggcttgaaccaacctacggatgactcgtgctttgacccctacacagtttcccattatgccgttggagatgagtgggaacgaatgtctgaatcaggctttaaactgttgtgccagtgcttaggctttggaagtggtcatttcagatgtgattcatctagatggtgccatgacaatggtgtgaactacaagattggagagaagtgggaccgtcagggagaaaatggccagatgatgagctgcacatgtcttgggaacggaaaaggagaattcaagtgtgaccctcatgaggcaacgtgttatgatgatgggaagacataccacgtaggagaacagtggcagaaggaatatctcggtgccatttgctcctgcacatgctttggaggccagcggggctggcgctgtgacaactgccgcagacctgggggtgaacccagtcccgaaggcactactggccagtcctacaaccagtattctcagagataccatcagagaacaaacactaatgttaattgcccaattgagtgcttcatgcctttagatgtacaggctgacagagaagattcccgagagtaaatcatctttccaatccagaggaacaagcatgtctctctgccaagatccatctaaactggagtgatgttagcagacccagcttagagttcttctttctttcttaagccctttgctctggaggaagttctccagcttcagctcaactcacagcttctccaagcatcaccctgggagtttcctgagggttttctcataaatgagggctgcacattgcctgttctgcttcgaagtattcaataccgctcagtattttaaatgaagtgattctaagatttggtttgggatcaataggaaagcatatgcagccaaccaagatgcaaatgttttgaaatgatatgaccaaaattttaagtaggaaagtcacccaaacacttctgctttcacttaagtgtctggcccgcaatactgtaggaacaagcatgatcttgttactgtgatattttaaatatccacagtactcactttttccaaatgatcctagtaattgcctagaaatatctttctcttacctgttatttatcaatttttcccagtatttttatacggaaaaaattgtattgaaaacacttagtatgcagttgataagaggaatttggtataattatggtgggtgattattttttatactgtatgtgccaaagctttactactgtggaaagacaactgttttaataaaagatttacattccacaacttgaagttcatctatttgatataagacaccttcgggggaaataattcctgtgaatattctttttcaattcagcaaacatttgaaaatctatgatgtgcaagtctaattgttgatttcagtacaagattttctaaatcagttgctacaaaaactgattggtttttgtcacttcatctcttcactaatggagatagctttacactttctgctttaatagatttaagtggaccccaatatttattaaaattgctagtttaccgttcagaagtataatagaaataatctttagttgctcttttctaaccattgtaattcttcccttcttccctccacctttccttcattgaataaacctctgttcaaagagattgcctgcaagggaaataaaaatgactaagatattaaaaaaaaaaaaaaaaaa

SEQ ID NO: 36 - DNA, 7341 bp, Homo sapiens
gcgcgaggccgtcgattcgctcgcggctccatcgcggcctggccggggggcggtgtctgctgcgccaggttcgctggccgcacgtcttcaggtcctcctgttcctgggaggcgggcgcggcaggactgggaggtggcggcagcgggcgaggactcgccgaggacggggctccggcccgggataaccaactctccttctctcttctttggtgcttccccaggcggcggcggcggcgcccgggagccggagccttcgcggcgtccacgtccctcccccgctgcaccccgccccggcgcgagaggagagcgcgagagccccagccgcgggcgggcgggcggcgaagatggcagaggcaccggcttccccggccccgctctctccgctcgaagtggagctggacccggagttcgagccccagagccgtccgcgatcctgtacgtggcccctgcaaaggccggagctccaagcgagccctgccaagccctcgggggagacggccgccgactccatgatccccgaggaggaggacgatgaagacgacgaggacggcgggggacgggccggctcggccatggcgatcggcggcggcggcgggagcggcacgctgggctccgggctgctccttgaggactcggcccgggtgctggcacccggagggcaagaccccgggtctgggccagccaccgcggcgggcgggctgagcgggggtacacaggcgctgctgcagcctcagcaaccgctgccaccgccgcagccgggggcggctgggggctccgggcagccgaggaaatgttcgtcgcggcggaacgcctggggaaacctgtcctacgcggacctgatcacccgcgccatcgagagctccccggacaaacggctcactctgtcccagatctacgagtggatggtgcgttgcgtgccctacttcaaggataagggcgacagcaacagctctgccggctggaagaactccatccggcacaacctgtcactgcatagtcgattcatgcgggtccagaatgagggaactggcaagagctcttggtggatcatcaaccctgatggggggaagagcggaaaagccccccggcggcgggctgtctccatggacaatagcaacaagtataccaagagccgtggccgcgcagccaagaagaaggcagccctgcagacagcccccgaatcagctgacgacagtccctcccagctctccaagtggcctggcagccccacgtcacgcagcagtgatgagctggatgcgtggacggacttccgttcacgcaccaattctaacgccagcacagtcagtggccgcctgtcgcccatcatggcaagcacagagttggatgaagtccaggacgatgatgcgcctctctcgcccatgctctacagcagctcagccagcctgtcaccttcagtaagcaagccgtgcacggtggaactgccacggctgactgatatggcaggcaccatgaatctgaatgatgggctgactgaaaacctcatggacgacctgctggataacatcacgctcccgccatcccagccatcgcccactgggggactcatgcagcggagctctagcttcccgtataccaccaagggctcgggcctgggctccccaaccagctcctttaacagcacggtgttcggaccttcatctctgaactccctacgccagtctcccatgcagaccatccaagagaacaagccagctaccttctcttccatgtcacactatggtaaccagacactccaggacctgctcacttcggactcacttagccacagcgatgtcatgatgacacagtcggaccccttgatgtctcaggccagcaccgctgtgtctgcccagaattcccgccggaacgtgatgcttcgcaatgatccgatgatgtcctttgctgcccagcctaaccagggaagtttggtcaatcagaacttgctccaccaccagcaccaaacccagggcgctcttggtggcagccgtgccttgtcgaattctgtcagcaacatgggcttgagtgagtccagcagccttgggtcagccaaacaccagcagcagtctcctgtcagccagtctatgcaaaccctctcggactctctctcaggctcctccttgtactcaactagtgcaaacctgcccgtcatgggccatgagaagttccccagcgacttggacctggacatgttcaatgggagcttggaatgtgacatggagtccattatccgtagtgaactcatggatgctgatgggttggattttaactttgattccctcatctccacacagaatgttgttggtttgaacgtggggaacttcactggtgctaagcaggcctcatctcagagctgggtgccaggctgaaggatcactgaggaaggggaagtgggcaaagcagaccctcaaactgacacaagacctacagagaaaaccctttgccaaatctgctctcagcaagtggacagtgataccgtttacagcttaacacctttgtgaatcccacgccattttcctaacccagcagagactgttaatggccccttaccctgggtgaagcacttacccttggaacagaactctaaaaagtatgcaaaatcttccttgtacagggtggtgagccgcctgccagtggaggacagcacccctcagcaccacccaccctcattcagagcacaccgtgagcccccgtcggccattctgtggtgttttaatattgcgatggtttatgggacgttttaagtgttgttcttgtgtttgttttcctttgactttctgagtttttcacatgcattaacttgcggtatttttctgttaaaatgttaaccgtccttcccctagcaaatttaaaaacagaaagaaaatgttgtaccagttaccattccgggttcgagcatcacaagcttttgagcgcatggaactccataaactaacaaattacataaactaaagggggattttctttcttcttttgtttggtagaaaattatccttttctaaaaactgaacaatggcacaattgtttgctatgtgcacccgtccaggacagaaccgtgcataggcaaaaggagtggagcacagcgtccggcccagtgtgtttccggttctgagtcagggtgatctgtggacgggaccccagcaccaagtctacgggtgccagatcagtagggcctgtgatttcctgtcagtgtcctcagctaatgtgaacagtgttggtctgctggttagaaactagaatattgatattttcaggaaagaaatcagctcagctctccactcattgccaaatgtcactaaagggtttagttttaaggagaaagaaaaggaaaaaaaaaaaaaacaaaaaagtcctgttttgctttgcagaacaaatgaacttacaggtgagcattaagcttgcagtgagaaatgtgcgaagagtaaaaacccaagtcaatgctgaggcagttctaacttcactgttttcctaaatacacatccttgattattttcagccttgctatataatctgatctgctagaagtgtatgagtgagaggcaatagcatacaaactgattttttaaatataagcttaggttgtaattgtacaagtgactcaatggaagtacaaaatagggcagttttaacttttttttctgcttctatggatttcattttgttgtgttttcaaaaagttatggtgctgtataggtgctttctgtttaacctggaaagtgtgattatattcgttaccttctttggtagacggaatagttgggaccacctttggtacataagaaattggtataacgatgctctgattagcacagtatatgcatacttctccaaagtgatatatgaagactcttttctttgcataaaaagcattaggcatataaatgtataaatatattttatcatgtacagtacaaaaatggaaccttatgcatgggccttaggaatacaggctagtatttcagcacagacttccctgcttgagttcttgctgatgcttgcaccgtgacagtgggcaccaacacagacgtgccacccaaccccctgcacacaccaccggccaccaggggcccccttgtgcgccttggctttataactcctctgggggtgatattggtggtgatcacagctcctagcataatgagagttccatttggtattgtcacacgtctcctgcctcgcttgggttgccatgtttgagcgatggccctgttgatttcaccctgccttttactgaatctgtaaattgttgtgcaattgtggttatagtagactgtagcacattgccttttctaaactgctacatgtttataatcttcatttttaaagtatgtgtaatttttttaagtatgtattctattcatatggtctgcttgtcagtgagccagacttgcttactatattcctttataataatgctagccacttcctggattctttagtaatgtgctgtatgcaagaactttccagtagcagtgaaggagggttgcctctccaagcttcctaagggatgctgccctgtgtggggatgcattgcagaggcactagtagcatgggggctagagtggggagcgagatgtaaaagggtggggggataggagaattccagagtgcttccagcattagggtcctgagaacttctgagttcagagaaacatgcaaagtgactaacaaaatagctacttacctttgcagttttacagaccctgggagctgctttgggagtgagaaaggcaaccctccaatgtgtttcaactttaaaatgttgaattcttttcagacatggtatctcatttattctccttttctagcgtttgttgaatttcaggcagaatgtcttacagaatgtcctagaaccagattatcatttaatctgaaacagctgaggaagggacagagaaggtacaagggcaaggcagcacaaaacagatcaggagaatgaagagggaatgctttggttttttgttttgttttgttttttctttttcaagtaactaaaacagcatctacatgtagagtgttgtggagagctgagaccagggtaaagtcaagtgcagcatcagtactgcgagacccaccagcccctggagagggtcagccgagaatctggtagtgaagcctgtctagggtcccggcaccctcaccctcagccacctgcagagaggccagggccccagagactagcctggttctgaagtgggcaggggtgctgccagagccctctgccccttatgttgagaccctgctttcaggacaggccagccgttggccaccatgtcacattctgagtgagtgtcacaggtccctaacaataattttctgatctggagcatatcagcagaatgcttagcctcaaggggcctggcagctgtaatgtttgatttatgatgagaactatccgaggccacccttggcctctaaataagctgctctagggagccgcctactttttgatgagaaattagaagagtacctaatgttgaaaacatgacatgcgctcttgggatctgctgttctctccagggctccagaacctgatacctgttaccaaagctaggaaagagctttatcacaagccttcactgtcctggcatgagaactggctgccaggctcagtgtaccccattaactgtgaatgaatctgagcttggtttcctttattgcttcctctgcaatatgattgctgaaacacattttaaaaattcagaagcttgtcactcctgttaatgggaggatcagtcacacatgtgtagtacaaggcggactttgtgtttgtttttggtgttaatttttagcattgtgtgtgttgcttccccaccctgaggagaggacaccatggcttactactcaggacaagtatgccccgctcagggtgtgatttcaggtggcttccaaacttgtacgcagtttaaagatggtggggacagactttgcctctacctagtgaaccccacttaaagaataaggagcatttgaatctcttggaaaaggccatgaagaataaagcagtcaaaaagaagtcctccatgttggtgccaaggacttgcgaggggaaataaaaatgttatccagcctgaccaacatggagaaaccccgtctccattaaaaatacaaaattagcctggcatggtggcgcatgcctgtaatcccagctactctggaggctgaggcaggagaatcgcttgaacccaggaggcggaggtcgcagtgagccgagatcatgccagtgcactccagcctgggtaacaagagtgaaactccgtgtcaaaaaaaaaaaaaaaatgttactcatcctctctgaaagcaaaaaggaaaccctaacagctctgaactctggttttatttttcttgctgtatttgggtgaacattgtatgattaggcataatgttaaaaaaaaaaatttttttttggtagaaatgcaatcaccagtaaagaggtacgaaaaagctagcctctctcagagaccggggaggcagagtactactagaggaagtgaagttctgatggaatcatgcctgtcaaatgaggtcttgaagcggatgcccaaataaaagagtatattttatctaaatcttaagtgggtaacattttatgcagtttaaatgaatggaatattttcctcttgtttagttgtatctgtttgtatttttctttgatgaatgattggtcatgaggcctcttgccacactccagaaatacgtgtgcggctgcttttaagaactatgtgtctggtcacttatttctctaaaattatctcattgcctggcaatcagtcttctcttgtatacttgtcctagcacattatgtacatgggaaatgtaaacaaatgtgaaggaggaccagaaaaattagttaatatttaaaaaaatgtattgtgcattttggcttcacatgtttaactttttttaagaaaaaagttgcatgaatggaaaaaaaaatctgtatacagtatctgtaaaaactatcttatctgtttcaattccttgctcatatcccatataatctagaactaaatatggtgtgtggccatatttaaacacctgagagtcaagcagttgagactttgatttgaagcacctcatccttctttcaatgcgaacactatcatatggcattcttactgaggattttgtctaaccatatgttgccatgaattaactctgccgcctttcttaaggatcaaaaccagtttgatttgggaatcttcccctttccaaatgaaatagagatgcagtacttaactttccttggtgtttgtagatattgccttgtgtattccacttaaaaccgtaatctagtttgtaaaagagatggtgacgcatgtaaataaagcatcagtgacactct

SEQ ID NO: 37 - DNA, 3709 bp, Homo sapiens
ataaaacctggagcgcaggatcgcgcccaggagcggcgagctagcggacgcaaagactgggcatgctccgcggcggcgcaggttttggtcacaagtaggaagaagccagtgcaccagaccggcaaagagaagcgggagccgccgcggcagcgcggccgtggggtccgccgccgccgcatcggagcgggaggaggagcagcggggagggcgaggccgccgggccgagagccgtcccgcctgctctcggtcttctgccttcgcctccgcgcggtgcgtcggacccagggtctgtcacctgggcgccaggggccgccgccggggagccggagcgggcaggaccctccctccgccgactgcggcccgagagcgcccccgcggggtggagcggcagccgccttctgcgggcggctgagtgtccgtctcgcgcccggagcgggcgaccgccgtcagcccggaggaggaggaggaggaggagggggcggccatggggctgctgtcccagggctcgccgctgagctgggaggaaaccaagcgccatgccgaccacgtgcggcggcacgggatcctccagttcctgcacatctaccacgccgtcaaggaccggcacaaggacgttctcaagtggggcgatgaggtggaatacatgttggtatcttttgatcatgaaaataaaaaagtccggttggtcctgtctggggagaaagttcttgaaactctgcaagagaagggggaaaggacaaacccaaaccatcctaccctttggagaccagagtatgggagttacatgattgaagggacaccaggacagccctacggaggaacaatgtccgagttcaatacagttgaggccaacatgcgaaaacgccggaaggaggctacttctatattagaagaaaatcaggctctttgcacaataacttcatttcccagtaccttaacaagaaatatccgacataggagaggagaaaaggttgtcatcaatgtaccaatatttaaggacaagaatacaccatctccatttatagaaacatttactgaggatgatgaagcttcaagggcttctaagccggatcatatttacatggatgccatgggatttggaatgggcaattgctgtctccaggtgacattccaagcctgcagtatatctgaggccagatacctttatgatcagttggctactatctgtccaattgttatggctttgagtgctgcatctcccttttaccgaggctatgtgtcagacattgattgtcgctggggagtgatttctgcatctgtagatgatagaactcgggaggagcgaggactggagccattgaagaacaataactataggatcagtaaatcccgatatgactcaatagacagctatttatctaagtgtggtgagaaatataatgacatcgacttgacgatagataaagagatctacgaacagctgttgcaggaaggcattgatcatctcctggcccagcatgttgctcatctctttattagagacccactgacactgtttgaagagaaaatacacctggatgatgctaatgagtctgaccattttgagaatattcagtccacaaattggcagacaatgagatttaagccccctcctccaaactcagacattggatggagagtagaatttcgacccatggaggtgcaattaacagactttgagaactctgcctatgtggtgtttgtggtactgctcaccagagtgatcctttcctacaaattggattttctcattccactgtcaaaggttgatgagaacatgaaggtagcacagaaaagagatgctgtcttgcagggaatgttttatttcaggaaagatatttgcaaaggtggcaatgcagtggtggatggttgtggcaaggcccagaacagcacggagctcgctgcagaggagtacaccctcatgagcatagacaccatcatcaatgggaaggaaggtgtgtttcctggactgatcccaattctgaactcttaccttgaaaacatggaagtggatgtggacaccagatgtagtattctgaactacctaaagctaattaagaagagagcatctggagaactaatgacagttgccagatggatgagggagtttatcgcaaaccatcctgactacaagcaagacagtgtcataactgatgaaatgaattatagccttattttgaagtgtaaccaaattgcaaatgaattatgtgaatgcccagagttacttggatcagcatttaggaaagtaaaatatagtggaagtaaaactgactcatccaactagacattctacagaaagaaaaatgcattattgacgaactggctacagtaccatgcctctcagccagcccgtgtgtataatatgaagaccaaatgatagaactgtactgttttctgggccagtgagccagaaattgattaaggctttctttggtaggtaaatctagagtttatacagtgtacatgtacatagtaaagtatttttgattaacaatgtattttaataacatatctaaagtcatcatgaactggcttgtacatttttaaattcttactctggagcaacctactgtctaagcagttttgtaaatgtactggtaattgtacaatacttgcattccagagttaaaatgtttactgtaaatttttgttcttttaaagactacctgggacctgatttattgaaatttttctctttaaaaacattttctctcgttaattttcctttgtcatttcctttgttgtctacattaaatcacttgaatccattgaaagtgcttcaagggtaatcttgggtttctagcaccttatctatgatgtttcttttgcaattggaataatcacttggtcaccttgccccaagctttcccctctgaataaatacccattgaactctgatggctgttatcaaaggaacttttctttgtttaaatttgctgatgcaggaattaagtttaaacacaactctatagaaagaaaggagattattacccagaattcacatgtagtgattattaaggacaatttttttttttaactaaaaaagttggcggcaggggtggggggtggcaatcatttttcttcctatacatacaaaggatattgtcaaaaatggcgttcttctcttgtggcctgttattctgattgctgctgtatacagttttgtcactctttagtttttagttaagcatactgatagactttcctctaaaagccattcactccagattttacctggggaatattctacatactgcttactttctctataaaactcatcaataaatcatgaaaggcactgagttttgtaaatcaggaccctaaatgtttaattgtaaataagtttcagataattattatagctttgcgttgaagtttgttgttttttttctcaactagttaagtcaactgcttctgaaataactctgtattgtagattatgcagatctttacaggcataaatatttaaactgtaatatgctaacttgaagagattgcaataaagctgcttcagctaaccctgtttatgtttaaatactagggtttgttctatattttatacatgcattttggatgattaaagaatgcctggttttcgtttgcaatttgcttgtgtaaatcaggttgtaaaaaggcagataaattgaaatgtttgtggtatgaggaaataaaagaatggaattagctttcattcagaaaaaaaaaaaaa

SEQ ID NO: 38 - DNA, 8228 bp, Homo sapiens
ccgcgggtctatgggaagttcggggacttgacagccgctgccgccgcagggcatttttggtcgaagagagctgaagtaatgagaagacatcatggaggcccagtcccacagctccacgaccactgaaaagaaaaaagttgagaattccatagtgaagtgctccactcgaacagatgtgagcgagaaagccgttgcctccagcaccacttctaatgaggatgaaagtcctggacagacttatcacagagagagaagaaacgcaatcactatgcagccacagaatgtccaggggctcagcaaagtcagtgaggaaccttcaacatcgagtgacgagagggcctcattgatcaagaaagagatccatgggtccctgccacacgtggcggagccctctgtgccgtaccgcgggacggtgtttgccatggaccccaggaatggttacatggagccccactaccaccctcctcatcttttccctgccttccatcctcctgtaccaattgatgccagacatcatgagggccgttaccattacgatccatctccgattcctccattgcatatgacttccgccttatctagtagccctacgtatccggacctgcccttcattaggatctccccacaccggaaccccactgctgcttccgagtctcccttcagccctccacatccctacattaatccctacatggactatatccgctccttgcacagcagcccatcgctctccatgatctcagcaacccgtgggctgagccctacagatgcgccccatgcaggagtcagcccagcagaatactatcatcagatggccctgctaactggccagcgcagcccctatgcagacattattccctcagctgccaccgccggcacgggggccatccacatggaatatcttcatgctatggatagcaccagattctccagccccaggctgtcagccaggccgagccgaaaacgtacactgtccatatcaccactctccgatcatagctttgaccttcagaccatgataaggacgtctcccaactccttggtcacgattctcaataattcccgtagcagctcttcagcaagtggctcctatggtcacttatctgcaagtgcaatcagccctgccttgagcttcacctactcttccgcgcccgtctctctccacatgcatcagcagatcctaagccgacaacagagcttaggttcagcctttggacacagccctccactcatccaccctgccccaacttttccaacacagaggcctattccagggatccctacggttctgaaccccgtccaggtcagctccggcccttctgagtcctcacagaacaagcccacgagtgagtctgcagtgagcagcactggtgacccgatgcacaacaagaggtccaagatcaaacccgatgaagacctccccagcccaggggctcgggggcagcaggaacagcccgaaggaacaacccttgtcaaggaggaaggggacaaagatgaaagcaaacaggagcctgaagtcatctatgagacaaactgccactgggaaggctgcgcgagggagttcgacacccaagagcagcttgtgcaccatataaataacgaccatattcatggagagaagaaggagttcgtgtgcaggtggctggactgctcaagagagcagaaacccttcaaagcccagtatatgttggtagtgcatatgagaagacacacgggcgagaagcctcacaaatgcacttttgaaggttgcacaaaggcctactcgagactagaaaacttgaaaacacacttgagatctcacactggagagaaaccatacgtctgtgagcacgaaggttgcaacaaggctttctcaaatgcctctgatcgcgccaaacaccaaaacagaacgcattccaatgagaaaccatatgtgtgcaaaatcccaggctgcactaagcgttacacagacccaagctccctccggaaacatgtgaagacagtgcatggcccagaggctcatgtcaccaagaagcagcgaggggacatccatcctcggccgccacccccgagagattccggcagccattcacagtccaggtcgcctggccgaccgactcagggagcccttggtgagcagcaggacctcagcaacactacctcaaagcgggaagaatgcctccaggtgaaaaccgtcaaggcagagaagccaatgacatctcagccaagccctggtggtcagtcttcatgcagcagccaacagtcccccatcagcaactattccaacagtgggctcgagcttcctctgaccgatggaggtagtataggagacctcagtgccatcgatgaaaccccaatcatggactcaaccatttccactgcaaccacagcccttgctttgcaagccaggagaaacccggcagggaccaaatggatggagcacgtaaaactagaaaggctaaaacaagtgaatggaatgtttccgcgactgaaccccattctaccccctaaagcccctgcggtctctcctctcataggaaatggcacacagtccaacaacacctgcagcttgggtgggcccatgacgcttctcccgggcagaagcgacctctctggggtggacgtcactatgctgaacatgctcaacagaagggacagcagcgccagcaccatcagctcggcctacctgagcagccgccgctcctcagggatctcgccctgcttctccagccgccgctccagcgaggcgtcacaggccgagggccggccgcagaacgtgagcgtggccgactcctacgaccccatctccaccgacgcctcgcgccgctccagcgaagccagccagagcgacggcctgcccagcctgctcagcctcacgcccgcccagcagtaccgcctcaaggccaagtacgcggctgccacaggagggccgccgccgacgcccctgcccaacatggagaggatgagcctgaagacgcgcctggcgctgctcggggatgccctcgagcctggcgtggccctgcctccagttcatgccccgaggaggtgcagcgacgggggagcccacggctacgggcggcgccacctgcagccgcacgatgcgccgggccacggcgtgaggagggccagcgacccggtgcggacaggctccgagggcctggccctgcctcgtgtgccgcgcttcagcagcctcagcagctgcaaccccccggcgatggccacgtccgcggagaagcgcagtctcgtgcttcagaattacacgcggcccgagggcggccagtcccgaaacttccactcgtccccctgtcctcccagcatcaccgagaacgtcaccctggagtccctgaccatggacgctgatgccaacctgaacgatgaggatttcctgccggacgacgtggtgcagtatttaaattcccagaaccaagcagggtacgagcagcacttccccagcgccctcccggacgacagcaaagtgccccacgggcccggtgactttgacgcgcccgggctgccagacagccacgctggccagcagttccatgccctcgagcagccctgccccgagggcagcaaaaccgacctgcccattcagtggaacgaagtcagctccggaagcgccgacctgtcctcctccaagctcaagtgtgggccgcggcccgctgtgccgcagactcgcgcctttgggttctgcaacggcatggtcgtccacccgcagaaccccttgaggagcgggcctgctgggggctatcagaccctcggggagaacagcaacccctacggtggcccagagcacttgatgctccacaacagccccggaagtggcaccagtggaaacgccttccatgaacagccctgtaaggccccgcagtatgggaactgtctcaacaggcagccagtggcccctggtgcactcgacggtgcctgtggtgccgggattcaagcctcaaagctgaagagcacccccatgcaagggagcgggggccagctgaatttcggcctgccggtagcgccaaatgagtcagctggcagcatggtgaatggcatgcagaaccaggacccagtgggacaggggtacctggctcaccagctcctcggcgacagcatgcagcacccgggggcaggccgccccggtcagcagatgcttgggcagattagtgctacctcacacatcaacatctaccaagggccagagagctgcctgccaggggctcacggcatgggcagccagccgtcaagcttggcagttgtcaggggctaccagccatgtgccagctttgggggcagcaggcgccaggctatgccgagggacagccttgctctgcagtcaggacagctcagtgacacaagtcagacctgcagggtgaatggtatcaagatggagatgaaagggcagccccatccgctgtgctctaatctgcagaattactctggtcagttctatgaccaaaccgtgggcttcagtcagcaagacacgaaagctggttcattctctatttcagacgccagctgcctgctacaggggaccagcgccaaaaactctgagttactttccccaggtgctaatcaggtgacaagcacagtggacagcctcgacagccatgacctggaaggggtacagattgacttcgatgccatcatagacgatggggaccactccagcctgatgtcgggggccctgagcccaagtatcattcagaacctttcccatagctcctcccgcctcaccacgcctcgggcgtccctcccattcccagcgctgtccatgagcaccaccaacatggctatcggggacatgagttctttgctgacctccctagcggaagaaagcaaattccttgcagttatgcaataggctttaggaaaaaaagactgcaaccaacggaaatcaataggagttgaagagattaaactgactttgttttggctgtttttttagttctgtatgtattttagcaatctcatctcacctaactgagatgtgtttcaattatattccttttatggaaaaggactctgaaaaaccctaaagtattctagggagaaactgtcttccatttcagttttgaatcagtattgttacactcaaaccaccctctttttaaaaaaaaaaaaaaaaactgtaagccccgccccctttttagtaaaccgatgtaaatttgtgatgtgcatattcttctttcttttagaagagcagtcaaattaaaggatttgacatgttttgctgttgctcaaaggaaataggagttggtgtgcttgtgaccaaggggttacacttccagcttttaaaattctcctttacatgtgctcagtgttttgttttgtgttttggtttctgttttttattttaattcccacattgggcacaagaatcagaatatggatagctagtttaagaaacttttgtgggtgcactgtagcatagatgacagaatattgatgttccccccatctccaattcagttcagggcattccacagttaaacagaaatgggaacgtggggctcttataaatgaaatgggcgctcacagttttggttttcagctcttcatgtctgtaagtgtgctttgggggaggctatgtctgtatggtcgattctcagttatcacatttgcctctcctcccactaccttcatgaacattcagtgctgtttcgcactgcagttagagagaagggacggacagttggtgacactcagccacattgctacttttatctgttctggtaagaagttagatagatggtagattgaagcaattgggtagaattagttgggggaatatttatgagttgctgtgtttgttgattagttccatctctttcccattttaactgagaattgattatatatagctctaagtatataggtatttaaacaaccccacaagcggctgtatcagtaacatttattaattccactatagtgagggaggatttccattctaaataccttattttgagggatttataaaacttagttgtaaaagagaaagcccacatagtgggaataaattgcttcagccatttttagtatttgagagcactagggaagatgtttagtagctgtgtggatgccttttttcacaccctgtctattgaatgctgcatccattcacgaagttaaatgttacatgcagttagtccttaatgtggactggatctgtacttttgttttggattaaaacatttaaagatttttgaagtgcagctactccccacgtgcatttgatacacataaaagtcatactgtgtgtgcacaaagagtacatggattttccagcatattgctttaaaaaattatataaactgttaaaatattaacacctcaggctacctgctgtattctgtcccattgacccctggaattggatttactgcaagtgattgataattcaattatgtggcttttcccctttaatcttgccatttaaattacagtagaaagacaaaatcaagtaaaataaagtgttagataatagaaagagtgttaagaccagcccacttttctcatgtttatgttctttcatttggaccaagaatctccgcatggaggttgatttgccactggggactttggctaagactattaggtttgctttcaactagatgttcctgagacaagcagagggacactgcaattccccttccatgcctgctgttctcccccatgtaagtcttctttgaaattaacggatgtgtctcctttggaacagccccataacaaaagagaactactgatctgagcataggaaagtagaggctctaccacttttcagttgaaaaagcaagactttctctgtgtttctgaaacaaggcataatgttgtcacagaatcagagatccagtctcacttttccacaaatctccaaatctccagtcttatcttgtgtgctctaatggtttggttcaatccctttccaactcttgttttcaaagcatggggcctgagtgttctccactcctcctaagaaaggagcttgggtggaagggaccatgctgacctcctccatcagagggctcttccagtagtattctcggatgcaacctccatttctcagttaccattatttcctgtatcagctttgtccttcctggagggatgcacagtgatccggcccaccactgttgttgtcttgtgcttctgctctttcctatggtttcaggttattttctgggtttcccctattcttcttttatttctttttttttttatatttgctttcctttctactgcttttagatttgcaggagatgcaagtttcagctcaatgtttggcttctctcaatatggaaatttcagaaggacagaggagaggagggaggaagaagaaagtatactcctccagaatttcagtgatctgttgtggcagtccagtggaaggaaggtcttttgaggtcacttagaagcatctttttgggacatccttttgggatctctgtaggctaggcatctcatatcttgagactcacccccagcctccaagcctctctccatttctctaacctatgcattttagagcgagaggaccgcctcactagtgtcaccatcctgccttttctaaaacatgcaggctcacacattctactcctgcttaatgtctgtgttaaacgttttctaaccatttttgttttatttttctgaaaaagttaacccctcccaactcctcacacattggctcttcctcttgagccacaaagttttgattcttgcgatgtatgtgccttattttatgttaatcttgtcaatgagagggaccagttggtgttgcccaatcagcactccaaggctgtgtgtgcaccagccagagagcgcacggtggtagcagagtcgaggctgtcttgtatcctggtttcatgtgttgttttgaactgataggaggatgttctcttctgacaagttacccttgtgtatcctgcagacatgtaaaataaaatacaagttcatttttttcaccttttttagatttttttaaaaaataaaatgtgtaatcctttttttaaaagaaacacatgtaaatacatttaagtattgtaggcatagcgttcagatgtgactggcccaggcgttcctcggacaagcctgcattccccgtgatcacgcccacctcaagcccaggggctgcagcccagccacagatgaactctacctttgctttcagaaccacttagtccttttgtaacaaagaaaaaaaaatgtttcttacaatgtcaataaaaaattctttgtatggaaaaaaaaaaaaaaaa

SEQ ID NO: 39 - DNA, 941 bp, Homo sapiens
ccaagagctaaaagagagcaaggaggaaacaacagcagctccaaccagggcagccttcctgagaagatgcaaccaatcctgcttctgctggccttcctcctgctgcccagggcagatgcaggggagatcatcgggggacatgaggccaagccccactcccgcccctacatggcttatcttatgatctgggatcagaagtctctgaagaggtgcggtggcttcctgatacgagacgacttcgtgctgacagctgctcactgttggggaagctccataaatgtcaccttgggggcccacaatatcaaagaacaggagccgacccagcagtttatccctgtgaaaagacccatcccccatccagcctataatcctaagaacttctccaacgacatcatgctactgcagctggagagaaaggccaagcggaccagagctgtgcagcccctcaggctacctagcaacaaggcccaggtgaagccagggcagacatgcagtgtggccggctgggggcagacggcccccctgggaaaacactcacacacactacaagaggtgaagatgacagtgcaggaagatcgaaagtgcgaatctgacttacgccattattacgacagtaccattgagttgtgcgtgggggacccagagattaaaaagacttcctttaagggggactctggaggccctcttgtgtgtaacaaggtggcccagggcattgtctcctatggacgaaacaatggcatgcctccacgagcctgcaccaaagtctcaagctttgtacactggataaagaaaaccatgaaacgctactaactacaggaagcaaactaagcccccgctgtaatgaaacaccttctctggagccaagtccagatttacactgggagaggtgccagcaactgaataaatacctcttagctgagtggaaaaaaaaaaaaaaaaaa

SEQ ID NO: 40 - DNA, 1578 bp, Homo sapiens
agtgtggtactttgtcttgaggagatgtcctggactcacacggaaacttagggctacggaatgaagttctcactcccattaggtgacaggtttttagagaagccaatcagcgtcgccgcggtcctggttctaaagtcctcgctcacccacccggactcattctccccagacgccaaggatggtggtcatggcgccccgaaccctcttcctgctgctctcgggggccctgaccctgaccgagacctgggcgggctcccactccatgaggtatttcagcgccgccgtgtcccggcccggccgcggggagccccgcttcatcgccatgggctacgtggacgacacgcagttcgtgcggttcgacagcgactcggcgtgtccgaggatggagccgcgggcgccgtgggtggagcaggaggggccggagtattgggaagaggagacacggaacaccaaggcccacgcacagactgacagaatgaacctgcagaccctgcgcggctactacaaccagagcgaggccagttctcacaccctccagtggatgattggctgcgacctggggtccgacggacgcctcctccgcgggtatgaacagtatgcctacgatggcaaggattacctcgccctgaacgaggacctgcgctcctggaccgcagcggacactgcggctcagatctccaagcgcaagtgtgaggcggccaatgtggctgaacaaaggagagcctacctggagggcacgtgcgtggagtggctccacagatacctggagaacgggaaggagatgctgcagcgcgcggacccccccaagacacacgtgacccaccaccctgtctttgactatgaggccaccctgaggtgctgggccctgggcttctaccctgcggagatcatactgacctggcagcgggatggggaggaccagacccaggacgtggagctcgtggagaccaggcctgcaggggatggaaccttccagaagtgggcagctgtggtggtgccttctggagaggagcagagatacacgtgccatgtgcagcatgaggggctgccggagcccctcatgctgagatggaagcagtcttccctgcccaccatccccatcatgggtatcgttgctggcctggttgtccttgcagctgtagtcactggagctgcggtcgctgctgtgctgtggagaaagaagagctcagattgaaaaggagggagctactctcaggctgcaatgtgaaacagctgccctgtgtgggactgagtggcaagtccctttgtgacttcaagaaccctgactcctctttgtgcagagaccagcccacccctgtgcccaccatgaccctcttcctcatgctgaactgcattccttccccaatcacctttcctgttccagaaaaggggctgggatgtctccgtctctgtctcaaatttgtggtccactgagctataacttacttctgtattaaaattagaatctgagtataaatttactttttcaaattatttccaagagagattgatgggttaattaaaggagaagattcctgaaatttgagagacaaaataaatggaagacatgagaacttt

SEQ ID NO: 41 - DNA, 3241 bp, Homo sapiens
cgtggccctgtggcagccgagccatggtttctaaactgagccagctgcagacggagctcctggcggccctgctcgagtcagggctgagcaaagaggcactgatccaggcactgggtgagccggggccctacctcctggctggagaaggccccctggacaagggggagtcctgcggcggcggtcgaggggagctggctgagctgcccaatgggctgggggagactcggggctccgaggacgagacggacgacgatggggaagacttcacgccacccatcctcaaagagctggagaacctcagccctgaggaggcggcccaccagaaagccgtggtggagacccttctgcaggaggacccgtggcgtgtggcgaagatggtcaagtcctacctgcagcagcacaacatcccacagcgggaggtggtcgataccactggcctcaaccagtcccacctgtcccaacacctcaacaagggcactcccatgaagacgcagaagcgggccgccctgtacacctggtacgtccgcaagcagcgagaggtggcgcagcagttcacccatgcagggcagggagggctgattgaagagcccacaggtgatgagctaccaaccaagaaggggcggaggaaccgtttcaagtggggcccagcatcccagcagatcctgttccaggcctatgagaggcagaagaaccctagcaaggaggagcgagagacgctagtggaggagtgcaatagggcggaatgcatccagagaggggtgtccccatcacaggcacaggggctgggctccaacctcgtcacggaggtgcgtgtctacaactggtttgccaaccggcgcaaagaagaagccttccggcacaagctggccatggacacgtacagcgggccccccccagggccaggcccgggacctgcgctgcccgctcacagctcccctggcctgcctccacctgccctctcccccagtaaggtccacggtgtgcgctatggacagcctgcgaccagtgagactgcagaagtaccctcaagcagcggcggtcccttagtgacagtgtctacacccctccaccaagtgtcccccacgggcctggagcccagccacagcctgctgagtacagaagccaagctggtctcagcagctgggggccccctcccccctgtcagcaccctgacagcactgcacagcttggagcagacatccccaggcctcaaccagcagccccagaacctcatcatggcctcacttcctggggtcatgaccatcgggcctggtgagcctgcctccctgggtcctacgttcaccaacacaggtgcctccaccctggtcatcggcctggcctccacgcaggcacagagtgtgccggtcatcaacagcatgggcagcagcctgaccaccctgcagcccgtccagttctcccagccgctgcacccctcctaccagcagccgctcatgccacctgtgcagagccatgtgacccagagccccttcatggccaccatggctcagctgcagagcccccacgccctctacagccacaagcccgaggtggcccagtacacccacacgggcctgctcccgcagactatgctcatcaccgacaccaccaacctgagcgccctggccagcctcacgcccaccaagcaggtcttcacctcagacactgaggcctccagtgagtccgggcttcacacgccggcatctcaggccaccaccctccacgtccccagccaggaccctgccggcatccagcacctgcagccggcccaccggctcagcgccagccccacagtgtcctccagcagcctggtgctgtaccagagctcagactccagcaatggccagagccacctgctgccatccaaccacagcgtcatcgagaccttcatctccacccagatggcctcttcctcccagtaaccacggcacctgggccctggggcctgtactgcctgcttggggggtgatgagggcagcagccagccctgcctggaggacctgagcctgccgagcaaccgtggcccttcctggacagctgtgcctcgctccccactctgctctgatgcatcagaaagggagggctctgaggcgccccaacccgtggaggctgctcggggtgcacaggagggggtcgtggagagctaggagcaaagcctgttcatggcagatgtaggagggactgtcgctgcttcgtgggatacagtcttcttacttggaactgaagggggcggcctatgacttgggcacccccagcctgggcctatggagagccctgggaccgctacaccactctggcagccacacttctcaggacacaggcctgtgtagctgtgacctgctgagctctgagaggccctggatcagcgtggccttgttctgtcaccaatgtacccaccgggccactccttcctgccccaactccttccagctagtgacccacatgccatttgtactgaccccatcacctactcacacaggcatttcctgggtggctactctgtgccagagcctggggctctaacgcctgagcccagggaggccgaagctaacagggaaggcaggcagggctctcctggcttcccatccccagcgattccctctcccaggccccatgacctccagctttcctgtatttgttcccaagagcatcatgcctctgaggccagcctggcctcctgcctctactgggaaggctacttcggggctgggaagtcgtccttactcctgtgggagcctcgcaacccgtgccaagtccaggtcctggtggggcagctcctctgtctcgagcgccctgcagaccctgcccttgtttggggcaggagtagctgagctcacaaggcagcaaggcccgagcagctgagcagggccggggaactggccaagctgaggtgcccaggagaagaaagaggtgaccccagggcacaggagctacctgtgtggacaggactaacactcagaagcctgggggcctggctggctgagggcagttcgcagccaccctgaggagtctgaggtcctgagcactgccaggagggacaaaggagcctgtgaacccaggacaagcatggtcccacatccctgggcctgctgctgagaacctggccttcagtgtaccgcgtctaccctgggattcaggaaaaggcctggggtgacccggcaccccctgcagcttgtagccagccggggcgagtggcacgtttatttaacttttagtaaagtcaaggagaaatgcggtggaaaaa

SEQ ID NO: 42 - DNA, 5294 bp, Homo sapiens
ctagggcatggcatcccacgtgggtgtcagcacggccgcagaagaaccacttctctggcccacccatgcctgctaggccatgcttcttcagaagtggccacaactctcctgacgtctccagagccggtcattccacccagggggacttcagctgccactggacacttcaattgtacgctgcgaccagttgccaggaaggagagggctggcaagagagccgcggcagccgtggcagggtgtaggggacggtggacggccagggcccccccctctctctctttctctctctctctcttgcttggtttctgtaatgaggaagttctccgcagctcagtttcctttccctcactgagcgcctgaaacaggaagtcagtcagttaagctggtggcagcagccgaggccaccaagaggcaacgggcggcaggttgcagtggaggggcctccgctcccctcggtggtgtgtgggtcctgggggtgcctgccggcccggccgaggaggcccacgcccaccatggtcccctgctggaaccatggcaacatcacccgctccaaggcggaggagctgctttccaggacaggcaaggacgggagcttcctcgtgcgtgccagcgagtccatctcccgggcatacgcgctctgcgtgctgtatcggaattgcgtttacacttacagaattctgcccaatgaagatgataaattcactgttcaggcatccgaaggcgtctccatgaggttcttcaccaagctggaccagctcatcgagttttacaagaaggaaaacatggggctggtgacccatctgcaataccctgtgccgctggaggaagaggacacaggcgacgaccctgaggaggacacagtagaaagtgtcgtgtctccacccgagctgcccccaagaaacatcccgctgactgccagctcctgtgaggccaaggaggttcctttttcaaacgagaatccccgagcgaccgagaccagccggccgagcctctccgagacattgttccagcgactgcaaagcatggacaccagtgggcttccagaagagcatcttaaggccatccaagattatttaagcactcagctcgcccaggactctgaatttgtgaagacagggtccagcagtcttcctcacctgaagaaactgaccacactgctctgcaaggagctctatggagaagtcatccggaccctcccatccctggagtctctgcagaggttatttgaccagcagctctccccgggcctccgtccacgtcctcaggttcctggtgaggccaatcccatcaacatggtgtccaagctcagccaactgacaagcctgttgtcgtccattgaagacaaggtcaaggccttgctgcacgagggtcctgagtctccgcaccggccctcccttatccctccagtcacctttgaggtgaaggcagagtctctggggattcctcagaaaatgcagctcaaagtcgacgttgagtctgggaaactgatcattaagaagtccaaggatggttctgaggacaagttctacagccacaagaaaatcctgcagctcattaagtcacagaaatttctgaataagttggtgatcttggtggaaacagagaaggagaagatcctgcggaaggaatatgtttttgctgactccaaaaagagagaaggcttctgccagctcctgcagcagatgaagaacaagcactcagagcagccggagcccgacatgatcaccatcttcatcggcacctggaacatgggtaacgccccccctcccaagaagatcacgtcctggtttctctccaaggggcagggaaagacgcgggacgactctgcggactacatcccccatgacatttacgtgatcggcacccaagaggaccccctgagtgagaaggagtggctggagatcctcaaacactccctgcaagaaatcaccagtgtgacttttaaaacagtcgccatccacacgctctggaacatccgcatcgtggtgctggccaagcctgagcacgagaaccggatcagccacatctgtactgacaacgtgaagacaggcattgcaaacacactggggaacaagggagccgtgggggtgtcgttcatgttcaatggaacctccttagggttcgtcaacagccacttgacttcaggaagtgaaaagaaactcaggcgaaaccaaaactatatgaacattctccggttcctggccctgggcgacaagaagctgagtccctttaacatcactcaccgcttcacgcacctcttctggtttggggatcttaactaccgtgtggatctgcctacctgggaggcagaaaccatcatccagaaaatcaagcagcagcagtacgcagacctcctgtcccacgaccagctgctcacagagaggagggagcagaaggtcttcctacacttcgaggaggaagaaatcacgtttgccccaacctaccgttttgagagactgactcgggacaaatacgcctacaccaagcagaaagcgacagggatgaagtacaacttgccttcctggtgtgaccgagtcctctggaagtcttatcccctggtgcacgtggtgtgtcagtcttatggcagtaccagcgacatcatgacgagtgaccacagccctgtctttgccacatttgaggcaggagtcacttcccagtttgtctccaagaacggtcccgggactgttgacagccaaggacagattgagtttctcaggtgctatgccacattgaagaccaagtcccagaccaaattctacctggagttccactcgagctgcttggagagttttgtcaagagtcaggaaggagaaaatgaagaaggaagtgagggggagctggtggtgaagtttggtgagactcttccaaagctgaagcccattatctctgaccctgagtacctgctagaccagcacatcctcatcagcatcaagtcctctgacagcgacgaatcctatggcgagggctgcattgcccttcggttagaggccacagaaacgcagctgcccatctacacgcctctcacccaccatggggagttgacaggccacttccagggggagatcaagctgcagacctctcagggcaagacgagggagaagctctatgactttgtgaagacggagcgtgatgaatccagtgggccaaagaccctgaagagcctcaccagccacgaccccatgaagcagtgggaagtcactagcagggcccctccgtgcagtggctccagcatcactgaaatcatcaaccccaactacatgggagtggggccctttgggccaccaatgcccctgcacgtgaagcagaccttgtcccctgaccagcagcccacagcctggagctacgaccagccgcccaaggactccccgctggggccctgcaggggagaaagtcctccgacacctcccggccagccgcccatatcacccaagaagtttttaccctcaacagcaaaccggggtctccctcccaggacacaggagtcaaggcccagtgacctggggaagaacgcaggggacacgctgcctcaggaggacctgccgctgacgaagcccgagatgtttgagaaccccctgtatgggtccctgagttccttccctaagcctgctcccaggaaggaccaggaatcccccaaaatgccgcggaaggaacccccgccctgcccggaacccggcatcttgtcgcccagcatcgtgctcaccaaagcccaggaggctgatcgcggcgaggggcccggcaagcaggtgcccgcgccccggctgcgctccttcacgtgctcatcctctgccgagggcagggcggccggcggggacaagagccaagggaagcccaagaccccggtcagctcccaggccccggtgccggccaagaggcccatcaagccttccagatcggaaatcaaccagcagaccccgcccaccccgacgccgcggccgccgctgccagtcaagagcccggcggtgctgcacctccagcactccaagggccgcgactaccgcgacaacaccgagctcccgcatcacggcaagcaccggccggaggaggggccaccagggcctctaggcaggactgccatgcagtgaagccctcagtgagctgccactgagtcgggagcccagaggaacggcgtgaagccactggaccctctcccgggacctcctgctggctcctcctgcccagcttcctatgcaaggctttgtgttttcaggaaagggcctagcttctgtgtggcccacagagttcactgcctgtgagacttagcaccaagtgctgaggctggaagaaaaacgcacaccagacgggcaacaaacagtctgggtccccagctcgctcttggtacttgggaccccagtgcctcgttgagggcgccattctgaagaaaggaactgcagcgccgatttgagggtggagatatagataataataatattaataataataatggccacatggatcgaacactcatgatgtgccaagtgctgtgctaagtgctttacgaacattcgtcatatcaggatgacctcgagagctgaggctctagccacctaaaaccacgtgcccaaacccaccagtttaaaacggtgtgtgttcggaggggtgaaagcattaagaagcccagtgccctcctggagtgagacaagggctcggccttaaggagctgaagagtctgggtagcttgtttagggtacaagaagcctgttctgtccagcttcagtgacacaagctgctttagctaaagtcccgcgggttccggcatggctaggctgagagcagggatctacctggcttctcagttctttggttggaaggagcaggaaatcagctcctattctccagtggagagatctggcctcagcttgggctagagatgccaaggcctgtgccaggttccctgtgccctcctcgaggtgggcagccatcaccagccacagttaagccaagccccccaacatgtattccatcgtgctggtagaagagtctttgctgttgctcccgaaagccgtgctctccagcctggctgccagggagggtgggcctcttggttccaggctcttgaaatagtgcagccttttcttcctatctctgtggctttcagctctgcttccttggttattaggagaatagatgggtgatgtctttccttatgttgctttttcaacatagcagaattaatgtagggagctaaatccagtggtgtgtgtgaatgcagaagggaatgcaccccacattcccatgatggaagtctgcgtaaccaataaattgtgcctttctcactcaaaaaaaaaaaaaaaaaa

SEQ ID NO: 43 - DNA, 9059 bp, Homo sapiens
gagaaggacgcgcggcccccagcgcctcttgggtggccgcctcggagcatgacccccgcgggccagcgccgcgcgctctgatccgaggagaccccgcgctcccgcagccatggccaccgggggccggcggggggcggcggccgcgccgctgctggtggcggtggccgcgctgctactgggcgccgcgggccacctgtaccccggagaggtgtgtcccggcatggatatccggaacaacctcactaggttgcatgagctggagaattgctctgtcatcgaaggacacttgcagatactcttgatgttcaaaacgaggcccgaagatttccgagacctcagtttccccaaactcatcatgatcactgattacttgctgctcttccgggtctatgggctcgagagcctgaaggacctgttccccaacctcacggtcatccggggatcacgactgttctttaactacgcgctggtcatcttcgagatggttcacctcaaggaactcggcctctacaacctgatgaacatcacccggggttctgtccgcatcgagaagaacaatgagctctgttacttggccactatcgactggtcccgtatcctggattccgtggaggataattacatcgtgttgaacaaagatgacaacgaggagtgtggagacatctgtccgggtaccgcgaagggcaagaccaactgccccgccaccgtcatcaacgggcagtttgtcgaacgatgttggactcatagtcactgccagaaagtttgcccgaccatctgtaagtcacacggctgcaccgccgaaggcctctgttgccacagcgagtgcctgggcaactgttctcagcccgacgaccccaccaagtgcgtggcctgccgcaacttctacctggacggcaggtgtgtggagacctgcccgcccccgtactaccacttccaggactggcgctgtgtgaacttcagcttctgccaggacctgcaccacaaatgcaagaactcgcggaggcagggctgccaccagtacgtcattcacaacaacaagtgcatccctgagtgtccctccgggtacacgatgaattccagcaacttgctgtgcaccccatgcctgggtccctgtcccaaggtgtgccacctcctagaaggcgagaagaccatcgactcggtgacgtctgcccaggagctccgaggatgcaccgtcatcaacgggagtctgatcatcaacattcgaggaggcaacaatctggcagctgagctagaagccaacctcggcctcattgaagaaatttcagggtatctaaaaatccgccgatcctacgctctggtgtcactttccttcttccggaagttacgtctgattcgaggagagaccttggaaattgggaactactccttctatgccttggacaaccagaacctaaggcagctctgggactggagcaaacacaacctcaccatcactcaggggaaactcttcttccactataaccccaaactctgcttgtcagaaatccacaagatggaagaagtttcaggaaccaaggggcgccaggagagaaacgacattgccctgaagaccaatggggaccaggcatcctgtgaaaatgagttacttaaattttcttacattcggacatcttttgacaagatcttgctgagatgggagccgtactggccccccgacttccgagacctcttggggttcatgctgttctacaaagaggccccttatcagaatgtgacggagttcgacgggcaggatgcgtgtggttccaacagttggacggtggtagacattgacccacccctgaggtccaacgaccccaaatcacagaaccacccagggtggctgatgcggggtctcaagccctggacccagtatgccatctttgtgaagaccctggtcaccttttcggatgaacgccggacctatggggccaagagtgacatcatttatgtccagacagatgccaccaacccctctgtgcccctggatccaatctcagtgtctaactcatcatcccagattattctgaagtggaaaccaccctccgaccccaatggcaacatcacccactacctggttttctgggagaggcaggcggaagacagtgagctgttcgagctggattattgcctcaaagggctgaagctgccctcgaggacctggtctccaccattcgagtctgaagattctcagaagcacaaccagagtgagtatgaggattcggccggcgaatgctgctcctgtccaaagacagactctcagatcctgaaggagctggaggagtcctcgtttaggaagacgtttgaggattacctgcacaacgtggttttcgtccccagaaaaacctcttcaggcactggtgccgaggaccctaggccatctcggaaacgcaggtcccttggcgatgttgggaatgtgacggtggccgtgcccacggtggcagctttccccaacacttcctcgaccagcgtgcccacgagtccggaggagcacaggccttttgagaaggtggtgaacaaggagtcgctggtcatctccggcttgcgacacttcacgggctatcgcatcgagctgcaggcttgcaaccaggacacccctgaggaacggtgcagtgtggcagcctacgtcagtgcgaggaccatgcctgaagccaaggctgatgacattgttggccctgtgacgcatgaaatctttgagaacaacgtcgtccacttgatgtggcaggagccgaaggagcccaatggtctgatcgtgctgtatgaagtgagttatcggcgatatggtgatgaggagctgcatctctgcgtctcccgcaagcacttcgctctggaacggggctgcaggctgcgtgggctgtcaccggggaactacagcgtgcgaatccgggccacctcccttgcgggcaacggctcttggacggaacccacctatttctacgtgacagactatttagacgtcccgtcaaatattgcaaaaattatcatcggccccctcatctttgtctttctcttcagtgttgtgattggaagtatttatctattcctgagaaagaggcagccagatgggccgctgggaccgctttacgcttcttcaaaccctgagtatctcagtgccagtgatgtgtttccatgctctgtgtacgtgccggacgagtgggaggtgtctcgagagaagatcaccctccttcgagagctggggcagggctccttcggcatggtgtatgagggcaatgccagggacatcatcaagggtgaggcagagacccgcgtggcggtgaagacggtcaacgagtcagccagtctccgagagcggattgagttcctcaatgaggcctcggtcatgaagggcttcacctgccatcacgtggtgcgcctcctgggagtggtgtccaagggccagcccacgctggtggtgatggagctgatggctcacggagacctgaagagctacctccgttctctgcggccagaggctgagaataatcctggccgccctccccctacccttcaagagatgattcagatggcggcagagattgctgacgggatggcctacctgaacgccaagaagtttgtgcatcgggacctggcagcgagaaactgcatggtcgcccatgattttactgtcaaaattggagactttggaatgaccagagacatctatgaaacggattactaccggaaagggggcaagggtctgctccctgtacggtggatggcaccggagtccctgaaggatggggtcttcaccacttcttctgacatgtggtcctttggcgtggtcctttgggaaatcaccagcttggcagaacagccttaccaaggcctgtctaatgaacaggtgttgaaatttgtcatggatggagggtatctggatcaacccgacaactgtccagagagagtcactgacctcatgcgcatgtgctggcaattcaaccccaagatgaggccaaccttcctggagattgtcaacctgctcaaggacgacctgcaccccagctttccagaggtgtcgttcttccacagcgaggagaacaaggctcccgagagtgaggagctggagatggagtttgaggacatggagaatgtgcccctggaccgttcctcgcactgtcagagggaggaggcggggggccgggatggagggtcctcgctgggtttcaagcggagctacgaggaacacatcccttacacacacatgaacggaggcaagaaaaacgggcggattctgaccttgcctcggtccaatccttcctaacagtgcctaccgtggcgggggcgggcaggggttcccattttcgctttcctctggtttgaaagcctctggaaaactcaggattctcacgactctaccatgtccaatggagttcagagatcgttcctatacatttctgttcatcttaaggtggactcgtttggttaccaatttaactagtcctgcagaggatttaactgtgaacctggagggcaaggggtttccacagttgctgctcctttggggcaacgacggtttcaaaccaggattttgtgttttttcgttccccccacccgcccccagcagatggaaagaaagcacctgtttttacaaattctttttttttttttttttttttgctggtgtctgagcttcagtataaaagacaaaacttcctgtttgtggaacaaaagttcgaaagaaaaaacaaaacaaaaacacccagccctgttccaggagaatttcaagttttacaggttgagcttcaagatggtttttttggttttttttttttctctcatccaggctgaaggattttttttttctttacaaaatgagttcctcaaattgaccaatagctgctgctttcatattttggataagggtctgtggtcccggcgtgtgctcacgtgtgtatgcacgtgtgtgtgtccattagacacggctgatgtgtgtgcaaagtatccatgcggagttgatgctttgggaattggctcatgaaggttcttctcaagggtgcgagctcatccccctctctccttccttcttattgactgggagactgtgctctcgacagattcttcttgtgtcagaagtctagcctcaggtttctaccctcccttcacattggtggccaagggaggagcatttcatttggagtgattatgaatcttttcaagaccaaaccaagctaggacattaaaaaaaaaaaaagaaaaagaaagaaaaaacaaaatggaaaaaggaaaaaaaaaaagaactgagatgacagagttttgagaatatatttgtaccatatttaatttttaaagtctctggtattagcctcataagttattgactattccccggggttggcggggagtggggacatgagttggtctgcctgttgtggggccgggaaggggagggagtcaggcacaagtggcctctttgtttggtcttaaaggcatccatttctgggaatgaagccatgttcgctgctaacacttttggatgttgtgaggccacgtggagtgtgtgagagactaggttttatggatggtctggttcaggtaccaggtctgctggaaggttcctgttcggataagctggtagctacctagctctgagcctgccttcaagaacacctgtgttcatcctctgattctctgtgtgtacctcttgtggcgtttcctctcccgggtgtgaacatcctaaccgttattgtgcaaacccaagaacgtcagatcccaaagcacaacaacctggatggactttgggaacatctaagcaatgtaagagagaggtgcactgagagtacgtcttggtcccctccaccctgagagcatctgacggtcctcagtactgaactcccggaagctgctctgagcccggtgacctcatctgggccaggtgtggtgcctgagctgaatgctcaggtgcttacagtgttgcaatccctaagagagtagagtctggaggagaaaccgtgaaaaagaccttacacaccaccaagaacttccgaatgggcgtgaatccaccgtttcttctctttgcaaaaagaaccaccacagctgctcaaagaacacagtgaactcatcactttggttcatcaaaaaatcatcgcccatgcgttattcctgagtgcattttcttacaactttttgactgcttccttttcttcttctcttaagagttgtgggcttaagaatgggatagagtcataatggcaacctccaagccctctcaattcttgattaagaacacaggtagacatgaatcccaattgtctattgctatcttatttatatgattcgggaaaatacagcatgtaaaaatattgctgaggagcctcagtgattgggtacaagaagcaagagtacagaaattatttttgccaaatttattttgtaaatatgagggtctgtacctaaatttaaaaaaaaaacacgtagaactaggtattttgttctcttcttagtaaatttgtagtggttgtatactacactagctgcaattttcacatttttctaattcagaaaggtttttcttatattaggggaaaaagtatttattttaatatataaaatcactctgaaaatcactctcataaaaaatggagcgcatgtaaatttttatcaaagaaaaataaacaggtgaatgggggatagtgattttcttttttcagcacagtctacctcagtgtattgttaagatgtgattcaatcatggacatctttgagatttcagaattctacctggaaccggtctgaatcagggaacgtgtgtatcagctgattcgaatgccagggaccagtaagaattttgagggagggagttgggatggagaaggtatggcctttatgcgagcatagatccttttcttcctggctggtaatattcttctctgaatttaatcttcctttaaaaaaaaatcctccatctattgtcactatgttccccaaacataaactaagttccaggctgtcatgatgtatctgatatatggggtaacccagcaaggtgtaccttcctttggtgagagatggctgccggggcaaagacgggctttgattcagagcaagcattcccacctgttccatggaatccccctgaagtgagcacaaaggtgccctgggctccctgatggtttatgcccactcctttcaggctggtgatgcaccttacacacaaacacctaatgcaatgtctttttaaattctccaagtgggatgggagcatgtgagggaaattccaatccaaaacccattaatgtgctgaacgctttttttttttttttttttttttttgcaacaacaccttggacctctgtgttggggtttgactgacctcaagctgatattattggaccttgtgcagctttgataacccatgtgagagtctaggcaggaccagtggggcccaaatcttgctgctcttgtacttttaggcactgcccttgcagactcacctttctccacctgccctggagaaaggtagggtgtgctgggcctgccccttgcaaatgggattcaccagtttcatttatttgactctactgccacagtgaaaagagcaaacagctattgggttgcaaacctcctttgacattaggaaatgttgactttgtaacaataaaactttggtcctagaaagacacggttgtcctgggagtttgtagtgttaagttgcaacaacaacaacaaaaagcaacaaaaccagcttaggataacactttttgttgcttgttcttaaagatgtctcactatgattaaaacccttttcattaatgtagtgaaagccacacaggagttccttcttccaggaggagaataccaagcacatcactttctctctgcatcagtgatgtcaaatacgcatcagaaaatgttcaggttttaggagctgtcctaggtgctgtttcatcattggaagcagtgagaaagagaagcactgctgcttgtctggatataggctgaggatgattgagagaagctgtgggaactgacacaagggtctgcataggtcatcctgtgaccctggggactatgttaccaactgacagacagatctttcactgtatcctagcagggcaggtagtccaccaagaaatgtgcttattggattgggaggtgtttatttgtagtctgctgtaacacgtgtgaaagagcaggagcgtcatcagcatatgacttgcgctggtcatccggtaaatggatgtgctgtagtcccagtgctaatcatttctctccttcacagtgggtggaagtttagggttaaatgtcctttgaatgtcacctggtgagtccttgacaccttaggctcttcagaaacaatggttttgttgaggatggggaacagggaatgccgattttatatacatggtacacagagaggggtgtcacttcagaaaatcttccagcatgttcttcagaatattaatttatatgcgaggtgaggttgggaatgaaaagaacaggtcagcacttttttttttcctagaacatacaaaagaacatggtggactttcagggagtgcaatggaaggtgaatatttccttaagggtccccgagaaatgggagtgaggggaggggacacaatggctttttgagcttacttttaccttctgatactagtcaaggtccagaaccagccaccagccaaatttctatctgggtgcgggccactgaaaatccttgttaaaaaccagatcacaaatctggggctcttggtcccattggagaaggaaggaagagcctcaaaataagtgtgcacccatgcacatattcaggaacagcttgtttagtctttacactttgcctgaaagttgcttctcctcgtccctttgtgtgcctgggtggcctcggccctgtgcgttggcaacgcaggatcaaatgtgctgcagcttttgcagaaaacaactcagaaacacaaaaccccccaacagctcaattattattttttcaatgttttcctacaagagccaagtagcaccatgtacagaagacgcctttttttttggaatattgaaatcgttctgcatgtaaaatatgggataatgacctgtttatattaaaattctgattaaattatctgagaata

SEQ ID NO: 44 - DNA, 2973 bp, Homo sapiens
gggccgctctctgacatcagagctgctgtagagcggagaggggcaggggtgaagggccacggtggtgcaacccaccacttcctccaaggaggagctgagaggaacaggaagtgtcaggactttacgacccgcgcctccagctgaggtttctagacgtgacccagggcagactggtagcaaagcccccacgcccagccaggagcaccgccgaggactccagcacaccgagggacatgctgggcctgcgccccccactgctcgccctggtggggctgctctccctcgggtgcgtcctctctcaggagtgcacgaagttcaaggtcagcagctgccgggaatgcatcgagtcggggcccggctgcacctggtgccagaagctgaacttcacagggccgggggatcctgactccattcgctgcgacacccggccacagctgctcatgaggggctgtgcggctgacgacatcatggaccccacaagcctcgctgaaacccaggaagaccacaatgggggccagaagcagctgtccccacaaaaagtgacgctttacctgcgaccaggccaggcagcagcgttcaacgtgaccttccggcgggccaagggctaccccatcgacctgtactatctgatggacctctcctactccatgcttgatgacctcaggaatgtcaagaagctaggtggcgacctgctccgggccctcaacgagatcaccgagtccggccgcattggcttcgggtccttcgtggacaagaccgtgctgccgttcgtgaacacgcaccctgataagctgcgaaacccatgccccaacaaggagaaagagtgccagcccccgtttgccttcaggcacgtgctgaagctgaccaacaactccaaccagtttcagaccgaggtcgggaagcagctgatttccggaaacctggatgcacccgagggtgggctggacgccatgatgcaggtcgccgcctgcccggaggaaatcggctggcgcaacgtcacgcggctgctggtgtttgccactgatgacggcttccatttcgcgggcgacgggaagctgggcgccatcctgacccccaacgacggccgctgtcacctggaggacaacttgtacaagaggagcaacgaattcgactacccatcggtgggccagctggcgcacaagctggctgaaaacaacatccagcccatcttcgcggtgaccagtaggatggtgaagacctacgagaaactcaccgagatcatccccaagtcagccgtgggggagctgtctgaggactccagcaatgtggtccatctcattaagaatgcttacaataaactctcctccagggtcttcctggatcacaacgccctccccgacaccctgaaagtcacctacgactccttctgcagcaatggagtgacgcacaggaaccagcccagaggtgactgtgatggcgtgcagatcaatgtcccgatcaccttccaggtgaaggtcacggccacagagtgcatccaggagcagtcgtttgtcatccgggcgctgggcttcacggacatagtgaccgtgcaggttcttccccagtgtgagtgccggtgccgggaccagagcagagaccgcagcctctgccatggcaagggcttcttggagtgcggcatctgcaggtgtgacactggctacattgggaaaaactgtgagtgccagacacagggccggagcagccaggagctggaaggaagctgccggaaggacaacaactccatcatctgctcagggctgggggactgtgtctgcgggcagtgcctgtgccacaccagcgacgtccccggcaagctgatatacgggcagtactgcgagtgtgacaccatcaactgtgagcgctacaacggccaggtctgcggcggcccggggagggggctctgcttctgcgggaagtgccgctgccacccgggctttgagggctcagcgtgccagtgcgagaggaccactgagggctgcctgaacccgcggcgtgttgagtgtagtggtcgtggccggtgccgctgcaacgtatgcgagtgccattcaggctaccagctgcctctgtgccaggagtgccccggctgcccctcaccctgtggcaagtacatctcctgcgccgagtgcctgaagttcgaaaagggcccctttgggaagaactgcagcgcggcgtgtccgggcctgcagctgtcgaacaaccccgtgaagggcaggacctgcaaggagagggactcagagggctgctgggtggcctacacgctggagcagcaggacgggatggaccgctacctcatctatgtggatgagagccgagagtgtgtggcaggccccaacatcgccgccatcgtcgggggcaccgtggcaggcatcgtgctgatcggcattctcctgctggtcatctggaaggctctgatccacctgagcgacctccgggagtacaggcgctttgagaaggagaagctcaagtcccagtggaacaatgataatccccttttcaagagcgccaccacgacggtcatgaaccccaagtttgctgagagttaggagcacttggtgaagacaaggccgtcaggacccaccatgtctgccccatcacgcggccgagacatggcttgccacagctcttgaggatgtcaccaattaaccagaaatccagttattttccgccctcaaaatgacagccatggccggccgggtgcttctgggggctcgtcggggggacagctccactctgactggcacagtctttgcatggagacttgaggagggagggcttgaggttggtgaggttaggtgcgtgtttcctgtgcaagtcaggacatcagtctgattaaaggtggtgccaatttatttacatttaaacttgtcagggtataaaatgacatcccattaattatattgttaatcaatcacgtgtatagaaaaaaaataaaacttcaatacaggctgtccatggaaaaaaaaaaaaaaaaaa

SEQ ID NO: 45 - DNA, 6135 bp, Homo sapiens
actgtctctccccatccggggcagcggggaatggctgagccaggggttcgccgcccccgccgccgccgccgccgccgccgccgccgccgccgcccgctttcggctcgggcctcaggaccgtagcatcctgagacattttgaattgacacttctcaagatttgactggatcagagttcatcatgtcaaagttgaaaagctcagagtcagtcagggtggtggttcgctgtcggcccatgaatggcaaggaaaaggctgcttcgtatgacaaagtggtggatgtggatgttaagctggggcaggtgtctgtgaagaaccccaaagggacggcccatgaaatgcccaagaccttcacctttgatgccgtctatgactggaatgccaagcagtttgaactgtacgatgagacgttccgaccacttgttgactctgtcctgcaaggtttcaatggaaccatttttgcctatggacaaactgggacaggaaaaacctacaccatggaaggaatccgtggtgaccctgaaaaaagaggagtcattcctaactcatttgaccatatcttcacccacatctctcgatcccagaatcaacaatacctggtcagggcttcttacttagagatctaccaggaggagatccgagatttgctctcaaaggatcagaccaaaaggcttgagctcaaagagaggcctgacacaggagtgtatgtgaaagacctgtcttcctttgtcaccaagagtgtgaaggagatagagcatgtgatgaatgtggggaaccagaaccgttctgtcggtgctaccaacatgaacgagcacagctcgcgttctcatgcaattttcgttatcactattgagtgcagcgaggtgggcctcgatggtgaaaaccacatccgtgtaggaaaattgaaccttgtagatcttgctggcagcgaacggcaagccaagaccggcgcacaaggggagagattaaaagaagctaccaagatcaacctctccctttccgctttgggtaatgtcatctctgctctagtggacggcaaaagcactcacattccatatcgggactcaaagcttaccaggctcctccaagattcccttggtggcaatgccaagactgtgatggtggccaacgtggggcctgcctcttacaacgtagaagagactctgaccactctgcgatatgccaaccgtgccaaaaacattaagaacaaaccaagggtcaatgaggaccccaaggatgccctccttcgagaattccaggaagagattgctcggctcaaggcccagctggaaaaacggtccattggtaggaggaagaggcgagagaagcggagggaaggtggtggcagtggtgggggtggggaagaggaggaggaggagggagaagagggtgaggaggaaggggatgataaggatgattactggcgggaacagcaagaaaaactggagattgagaagcgggccattgtagaggatcacagcttggttgcagaggagaagatgaggctgctgaaggagaaagagaaaaagatggaggacctgcggcgggagaaggatgctgccgagatgctgggcgccaagatcaaggccatggagagtaagttgcttgttggaggaaaaaatatagtagatcatacgaatgaacagcagaaaatcctggagcagaaacgacaggaaattgcagagcagaaacgtcgagaaagagaaatccagcaacagatggaaagtcgagatgaggagaccttggaacttaaagagacatacagctcattgcagcaagaggtggacatcaagaccaaaaaactcaaaaagctcttctccaagcttcaggcagtgaaggctgagatccatgacctccaagaagaacacatcaaggagcgccaagagctagagcagactcagaatgagctcaccagggagctgaaactcaagcatcttattatagaaaactttatccctctggaagaaaaaagtaaaattatgaatagagccttctttgatgaagaggaagatcattggaaactacatcctataaccagactggagaaccagcagatgatgaagcggccagtctcagccgtgggatataagagaccattgagccagcacgcaagaatgtccatgatgattcgtccagaggcccgatatagggcagaaaacattgtgctgttagagctggacatgcccagccggaccaccagagactatgagggtccagccattgcccccaaggtccaggctgcattggatgcggctctgcaggatgaagatgagatacaggtggatgcatcatcatttgaaagcactgcaaataagaaatccaaggccaggcctaaaagtggaaggaagtcgggatcctcctcctcttcctcaggaacccctgcatctcagctttatccacagtctcgggggctggttccaaagtaaagccagcttctcctctcccagggcggaaacagcatttgccttctgagagaagagactagcaaaaagctgcagagaggattcggcccaaactcagaactgttcccctgaggagaagcggtggcctctttgcagatcaaccaacttaatctggttgaacgtgctgttcctaatctggcactcagcccctctgggaaacatcttttaattagcatctcagaaatgcatgggtaaggtaaagtgcgatagttcaagtggaaagcaagagaatgaccagtgaccttgcttccttcccccttgccttcttctcccccttcccctgtgctccctttctctcctctctccttttctagcctgttctttacatggggctcccttcttgttgaacaatagggcagaatcaggagtcaccttagcaggaccacatctttggagcctcgggataaaatgacagtgaggttgaaaagtgaaaaccctagaacttgaataggtgcctgttcttgtagggagaaatgagaaatcgcatttggatccaggccccaggtgggcaccatcagcagtcttgcttccatgcacctcagtaagaagtggatctgcctttgggacctgctcagtgaggaaatctcttccaatttctgcttctgaatgattcaatgttgggagcaatagaaataacattccctttgccttctctgagtgtttagggaaatagcttctttaaaacctcaaaaccatgaccatcctgtcaaagacctaagtctgtaagctggtgccatgtccatacaccatgtcactttactcttcatttgtcaccatcttttcccatgcacgcatactctgaacatccttgtgtgggcccatcctctgcatccagagcatgctctgcagtgggcctgttttgtggaagaaaggaggctgtctctgccttctctgatgggactggagttgagggaaggagctgtattgtggcacttctgaattccccgttttgttccatattggtatagagagcagaagagtagctaggcagatgcagagatggagacatgagactcagtgcagtgggcagggaagacataacagatggaagcaaaggaatcctgcctgccttcagcagagaattcaccgaatcctagaactgtggctccctccaggcagagcctaagatgctggtgaagaatagctgtgtgattgaataggctcaaaggagagttcagaattcccatttacatattactagtttggtttgtaagttttagttccttgtattattgagattcagagcttcattttatgttggtcattaggtgaatattactcattttccctcaagagaagctcataagtgtgtgtgggtgtgagagcacgatggtgcctgtgttctgtgaatgtgtccatatgtgtctgtaagagagacagagaccaagaacttgcccaattttagaaatacactaatgtgcagttgttgccttttgtctgtattgaaggcccattgaatgactaatccaggctggaagcattcccatgtgggtgtctgagtccatgagccaagcctgaggggacagtgagtctccaggtctgccacactggtgcaccttgctggcacggtgcctcaggaaggtggcgactcaggtgggccttgagttatattttaactcagctgctcagttcccagggcacatttctggatcagaacccatgggaaacaggaggtactaagtgcaatgtcttagcattctgcaaaatggagatctgttgtccagcggcttatctcctttttagtaacccttctttctgaacccagggcccttttcagccttccctcatattttcttgagatcaaactttacttctttcttatttactaagaatttgcctgtttgaataagaacaaaacgctaaggtgggtagcctaagctgattttctgctggttacacgtgtctctcacaccacatttcctcaaagctaatctgaattctgtaggctaaaaatattcatgtagcaaatctgagaattgaaaactgcagataaccggccgggtatggtgactcatgcctgtaatcctagcactttgggaggccgaggtgggtggaccacctgaggttaggacttcaagaccagcctggccaacatggtgaaaccccatctgtactaaaaatacaaaaatttgcctggtgtggtggtgcatgcctctagtcctagctactcgggaggctgaggcacgagaatcacttgaacctgggaggcggaggttgcagtgagtcgagataacactactgcattccagcctgggtgacagagtgagactccccctcaaaaaaaaaaaaaaaaaaaaaaaaaacagaaagaaagaaaaagaaaactgcagataaccctatacattaatactggtatctcgaggtgactcttctgaccaagggtggttaagtgacacatagaacttttctaagagaagacagacaagttgacaggcatgccttgtactcagctgtgttcatgtggtggtctgtggaaagaaaagaagactcatttggaaatgaagctgtccctttccaagcagtctctggtgcttttcttctctcaaaatggatccgataaatatttgaatagagcagattgtagaatgtcgtgctgtcaccagaaagctgctgttttgggttctgcattgagccaaatatgtagaggacctaccaagcccactgagggactaggttttcatgtctctagtcatacctagaatgttctgagccgtctgagggccttcatgccggcagcagctagcaaagccagaaagcaagtctaacaggatctaagatgaccatcaggagaaggagtttgagactgtgtatgcaacccccaatagacccccttttactctgatctggagaatgtatctggcttcatattttcaagtcacatgtctctcagacccctggattcagaacccaaggccacaaatcataggcatgaagcactttcttaagactgacctaacgctggattatttcccgtccaatgcctgcatgctgcttgaattgctccacccacacctccatgaccaagggcgccagagtgctgcaactggggcgtgggccgctctctgcttttcctgtctgactctgacaagtcctccctcactgaatgtagaatcgttgccaagtttctgagaagtgtcgattccctgttaacatggatatcagttctgcctcacatttcccacttgaggttgaggcgtactggagacaacacctcagaccatctgaaccccatcagtggacgaaaatggggctgttaatatactctaaaagccatactaaaaatgctctgagggaactggctaagaatagtgggcctggtgattgtctatcacgcaaggctttgttttgtactgttcagaaatctgtcacctttctgcctgcccttgtttcctgaatgaaatgcttctggggttatttatgaaaggagtgatcctggggcaggcaggaggcagtgggcttcatggctccttgaagttattactgatcttgaccttctctttggctacctttagacaaagaatacgccaatcaatacttggggctctaagttttacaattgatatttatttgtatcatctctttgtctaggaatgtaaaagtgattctaaactaagatgtgtaataaaaatcaatcagatttattgtacctacaaaaaaaaaaaaaaaaaaaaaaaa

SEQ ID NO: 46 - DNA, 4426 bp, Homo sapiens
gtgcgcgctccgccctcgggccgcctgcactgcaattggttggtgtctctgggagggatttgaaacttggcggttaaagctccggctgggacagggcggcgggagaccccgggtgaacggggaagggacatttagtttgagacggtgctgagataggatcatgaaggaagaggtgaagggaattcctgtaagagtggcactgcgttgtcgccctctggtccccaaagagattagcgagggctgccagatgtgcctttccttcgtgcccggggagactcaggtggtggttggtactgataaatccttcacctacgattttgtgtttgacccctgtactgagcaggaagaagtcttcaataaagcagtagcgccgctcataaaaggcatatttaaaggatataatgcaacggtcctggcctatgggcagactggctctggaaaaacctattcaatgggaggtgcatacactgcggagcaggagaatgaaccaacagttggcattattcctagggtaatacaactgctcttcaaagaaattgataaaaagagtgactttgaatttactctgaaagtgtcttacttagagatttacaatgaagaaattttggatcttctatgcccatctcgtgagaaagctcaaataaatatacgggaggatcctaaggaaggcataaagattgtgggactcactgagaagactgttttagttgccttggatactgtttcctgtttggagcagggcaacaactctaggactgtggcctccacagctatgaactcccagtcgtcccgatctcatgccatctttacaatctccatagagcaaagaaagaaaagtgacaagaattgcagctttcgctccaagctgcatcttgtagatctcgctggatcagaaagacagaagaaaaccaaggctgaaggggatcgtctaaaagagggtattaatattaaccgaggcctcctatgcttgggaaatgtaatcagtgctcttggagatgacaaaaagggtagctttgtgccctacagagattccaagttaactcgactgctgcaagattctctaggaggtaacagccacactcttatgatagcctgtgtgagtcctgctgactccaatctagaggaaacattaagtacccttcgctatgctgacagagcaagaaaaatcaagaacaaacctattgttaatattgatccccacacagctgaacttaatcatctaaagcaacaggtacaacagctacaagtcttgttgctacaagcccatggaggtaccctgcctggatctataaatgcagaaccatcagagaatctacaatccctgatggagaagaatcagtccctggtagaggagaatgaaaaattaagtcgttgtctgagcaaggcagctggtcagacagcccagatgttggagaggatcattttgacagagcaagtgaatgaaaaactgaacgccaagctagaagagctcaggcagcatgtggcctgcaagctggatcttcaaaagctagtggagactttggaagaccaggaattgaaagaaaatgtagagataatttgtaacctgcagcaactgattacccagttatcagatgaaactgttgcttgcacggctgcagccattgatactgcggtagaagaagaagctcaagtggaaaccagtccagagacaagcaggtcttctgacgcttttaccactcagcatgctctccatcaagctcagatgtctaaggaggtggttgagttgaataacgcccttgcactgaaagaggccctagttaggaagatgactcagaacgacaaccaactacagcccattcagtttcaataccaggataacataaaaaatctagaattagaagtcatcaatctgcaaaaggaaaaggaagaattggttcgtgaacttcagacagcaaagaagaatgtcaaccaagccaagctgagtgagcaccgccacaaacttctccaggagctggagggtcaaatagctgatctgaagaagaaactgaatgagcagtccaaacttctgaaactaaaggaatccacagagcgtactgtctccaagctgaaccaagagatatggatgatgaaaaaccagcgggtacagttaatgcgtcaaatgaaagaggatgctgagaagtttagacaatggaagcagaaaaaagacaaagaagtaatacagttgaaagaacgagaccgtaagaggcaatatgagctgctcaaacttgaaagaaacttccagaaacaatccagtgtgctcagacgtaaaacggaagaggcagcagctgccaacaagcgactcaaggatgctctccagaaacaacgagaggtcacagataagcggaaagagactcagagccatggaaaggaaggtattgcagctcgagtgaggaattggcttggaaatgaaattgaggttatggtcagtactgaggaagccaaacgccatctgaatgacctccttgaagacagaaagatcctggctcaggatgtggttcaactcaaagaaaaaaaggaatctcgggagaatccacctcctaaactccggaagtgtacattctccctttctgaggtgcatggtcaagttttggagtcagaagattgtattacaaaacagattgaaagcctagagactgaaatggaactcaggagtgctcagattgctgacctacagcagaagctgctggatgcagaaagtgaagataggccaaaacaatgctgggagaatattgccaccattctggaagccaagtgtgccctgaaatatttgattggagagctggtctcctccaaaatacatgtcaccaaacttgaaaacagcctgagacagagcaaggccagctgtgctgacatgcagaagatgctatttgaggaacaaaatcatttttctgagatagagacagagttacaagctgagctggtcagaatggagcaacagcaccaagagaaggtgctataccttgtcagccagctgcaggaaagccaaatggcagagaagcagttagagaaatcagccagtgaaaaggaacaacagctggtgagcacactgcagtgtcaggatgaagaacttgagaagatgcgagaagtgtgtgagcaaaatcagcagcttctccaagagaatgaaatcatcaagcagaaactgatcctcctccaggtagccagcagacagaaacatcttcctaatgatacccttctatctccagactcttcttttgaatatatcccacctaagccaaaaccttctcgtgttaaagaaaagtttctggagcaaagcatggacatcgaggatctaaaatattgttcagagcattctgtgaatgagcatgaagatggtgatggtgatggcgacagtgatgagggggatgatgaggaatggaagccaacaaaattagtcaaggtgtccaggaagaacatccaagggtgttcctgcaagggctggtgtgggaacaagcagtgtgggtgcaggaagcaaaagtcagactgtggtgtggactgtagctgtgaccccacaaagtgtcggaaccgccagcaaggcaaggatagcttgggcactgttgaacagacccaggattccgaaggctccttcaaactggaggatcctaccgaggtgaccccaggattgagcttctttaaccctgtctgtgccacccccaatagcaagatcctgaaagagatgtgtgacatggagcaggtgctgtcaaagaagactgctccagctccctccccttttgacctcccagagtcgaaacatggagcaacagaataccaacaaaataagcctccagggaagaaaaagaaacgagctctggctagcaacaccagcttcttctctggctgctcccctatcgaagaagaggcccactgaagttggagtcatcatctctacccccaatctggcttgggagatgctttccagttgcagccagaaggggttttttaaatgacttctctggatttcaggtttcttgccgttgaaaaaaaggaacaaagcattactaaaaagaaggtaacctttgttggatgttgtccctcagtctccatccccagactactgctctctgctctctagaaggctgctaaaccacctgctgaagagagaaccaacagactttcctaatgactcatcaggaaccagtcctcagtatgatcaagttccttcttatttgtgagcagttcaggctatctcctgatggggatgaggccaaggctttcttatcttttggttgtctctgcttaatggaggagcctggcctaggatggaggtctggctcagatctttcactccacctcgggaatggggttgtgatctttcctgtcctgaccccctctgaattgtaagtgtttcaatagtactcttgattgtatgccatgttgttgaagtaaatgaattatttttaaatgttaagtaaataaaccttagcccatc

SEQ ID NO: 47 - DNA, 4750 bp, Homo sapiens
gaagccgcccgtttcctgccgagcggcgcgacggcacctgagcgactgcggcggcggcggcggcggcggcggcgcctcggagcgggcggcccgggctgtagtgccggcgccgccgcgtcttcccggtctcctttcccggccgcacagggttttataggatcacattgacaaaagtaccatggagttttatgagtcagcatattttattgttcttattccttcaatagttattacagtaattttcctcttcttctggcttttcatgaaagaaacattatatgatgaagttcttgcaaaacagaaaagagaacaaaagcttattcctaccaaaacagataaaaagaaagcagaaaagaaaaagaataaaaagaaagaaatccagaatggaaacctccatgaatccgactctgagagtgtacctcgagactttaaattatcagatgctttggcagtagaagatgatcaagttgcacctgttccattgaatgtcgttgaaacttcaagtagtgttagggaaagaaaaaagaaggaaaagaaacaaaagcctgtgcttgaagagcaggtcatcaaagaaagtgacgcatcaaagattcctggcaaaaaagtagaacctgtcccagttactaaacagcccacccctccctctgaagcagctgcctcgaagaagaaaccagggcagaagaagtctaaaaatggaagcgatgaccaggataaaaaggtggaaactctcatggtaccatcaaaaaggcaagaagcattgcccctccaccaagagactaaacaagaaagtggatcagggaagaagaaagcttcatcaaagaaacaaaagacagaaaatgtcttcgtagatgaaccccttattcatgcaactacttatattcctttgatggataatgctgactcaagtcctgtggtagataagagagaggttattgatttgcttaaacctgaccaagtagaagggatccagaaatctgggactaaaaaactgaagaccgaaactgacaaagaaaatgctgaagtgaagtttaaagattttcttctgtccttgaagactatgatgttttctgaagatgaggctctttgtgttgtagacttgctaaaggagaagtctggtgtaatacaagatgctttaaagaagtcaagtaagggagaattgactacgcttatacatcagcttcaagaaaaggacaagttactcgctgctgtgaaggaagatgctgctgctacaaaggatcggtgtaagcagttaacccaggaaatgatgacagagaaagaaagaagcaatgtggttataacaaggatgaaagatcgaattggaacattagaaaaggaacataatgtatttcaaaacaaaatacatgtcagttatcaagagactcaacagatgcagatgaagtttcagcaagttcgtgagcagatggaggcagagatagctcacttgaagcaggaaaatggtatactgagagatgcagtcagcaacactacaaatcaactggaaagcaagcagtctgcagaactaaataaactacgccaggattatgctaggttggtgaatgagctgactgagaaaacaggaaagctacagcaagaggaagtccaaaagaagaatgctgagcaagcagctactcagttgaaggttcaactacaagaagctgagagaaggtgggaagaagttcagagctacatcaggaagagaacagcggaacatgaggcagcacagcaagatttacagagtaaatttgtggccaaagaaaatgaagtacagagtctgcatagtaagcttacagataccttggtatcaaaacaacagttggagcaaagactaatgcagttaatggaatcagagcagaaaagggtgaacaaagaagagtctctacaaatgcaggttcaggatattttggagcagaatgaggctttgaaagctcaaattcagcagttccattcccagatagcagcccagacctccgcttcagttctagcagaagaattacataaagtgattgcagaaaaggataagcagataaaacagactgaagattctttagcaagtgaacgtgatcgtttaacaagtaaagaagaggaacttaaggatatacagaatatgaatttcttattaaaagctgaagtgcagaaattacaggccctggcaaatgagcaggctgctgctgcacatgaattggagaagatgcaacaaagtgtttatgttaaagatgataaaataagattgctggaagagcaactacaacatgaaatttcaaacaaaatggaagaatttaagattctaaatgaccaaaacaaagcattaaaatcagaagttcagaagctacagactcttgtttctgaacagcctaataaggatgttgtggaacaaatggaaaaatgcattcaagaaaaagatgagaagttaaagactgtggaagaattacttgaaactggacttattcaggtggcaactaaagaagaggagctgaatgcaataagaacagaaaattcatctctgacaaaagaagttcaagacttaaaagctaagcaaaatgatcaggtttcttttgcctctctagttgaagaacttaagaaagtgatccatgagaaagatggaaagatcaagtctgtagaagagcttctggaggcagaacttctcaaagttgctaacaaggagaaaactgttcaggatttgaaacaggaaataaaggctctaaaagaagaaataggaaatgtccagcttgaaaaggctcaacagttatctatcacttccaaagttcaggagcttcagaacttattaaaaggaaaagaggaacagatgaataccatgaaggctgttttggaagagaaagagaaagacctagccaatacagggaagtggttacaggatcttcaagaagaaaatgaatctttaaaagcacatgttcaggaagtagcacaacataacttgaaagaggcctcttctgcatcacagtttgaagaacttgagattgtgttgaaagaaaaggaaaatgaattgaagaggttagaagccatgctaaaagagagggagagtgatctttctagcaaaacacagctgttacaggatgtacaagatgaaaacaaattgtttaagtcccaaattgagcagcttaaacaacaaaactaccaacaggcatcttcttttccccctcatgaagaattattaaaagtaatttcagaaagagagaaagaaataagtggtctctggaatgagttagattctttgaaggatgcagttgaacaccagaggaagaaaaacaatgaccttcgggagaaaaactgggaagcaatggaagcattggcatcaactgaaaaaatgctgcaggacaaagtgaacaagacttccaaggaaaggcagcaacaggtggaagctgttgagttggaggctaaagaagttctcaaaaaattatttccaaaggtgtctgtcccttctaatttgagttatggtgaatggttgcatggatttgaaaaaaaggcaaaagaatgtatggctggaacttcagggtcagaggaggttaaggttctagagcacaagttgaaagaagctgatgaaatgcacacattgttacagctagagtgtgaaaaatacaaatccgtccttgcagaaacagaaggaattttacagaagctacagagaagtgttgagcaagaagaaaataaatggaaagttaaggtcgatgaatcacacaagactattaaacagatgcagtcatcatttacatcttcagaacaagagctagagcgattaagaagcgaaaataaggatattgaaaatctgagaagagaacgagaacatttggaaatggaactagaaaaggcagagatggaacgatctacctatgttacagaagtcagagagctgaaagatctgttgactgaattgcagaaaaaacttgatgattcatattctgaagcagtaagacagaatgaagagctaaatttgttgaaggcacagttaaatgaaacactcacaaaacttagaactgaacaaaatgaaagacagaaggtagctggtgatttgcataaggctcaacagtcactggagcttatccagtcaaaaatagtaaaagctgctggagacactactgttattgaaaatagtgatgtttccccagaaacggagtcttctgagaaggagacaatgtctgtaagtctaaatcagactgtaacacagttacagcagttgcttcaggcggtaaaccaacagctcacaaaggagaaagagcactaccaggtgttagagtgaagtaattgggaaactgttcatttgaggataaaaaaggcattgtattatattttgccaaattaaagccttatttatgttttcaccctttctactttgtcagaaacactgaacagagttttgtcttttctaatccttgttagactactgatttaaagaaggaaaaaaaaaagccaactctgtagacaccttcagagtttagttttataataaaaactgtttgaataattagacctttacattcctgaagataaacatgtaatcttttatcttattttgctcaataaaattgttcagaagatcaaagtggtaaagacaatgtaaaatttaacattttaatactgatgttgtacactgttttacttaacattttgggaagtaactgcctctgacttcaactcaagaaaacacttttttgttgctaatgtaatcggtttttgtaatggcgtcagcaaataaaaggatgcttattattcaaacttgaaaaaaaaaaaaaaaaaa

SEQ ID NO: 48 - DNA, 2717 bp, Homo sapiens
agtgtcgcgataaatgggcgccggcggagcggagggagatccgagcggcggcggcaagctggctgcgagcggctgagcagcactccaagctcgccggcctttggtctccaggacttgtcccagcagcccctcgaactgagaattacaccatcggacccctggctctgaggccttcagacttggactgtgtcacactgccaggcttccagggctccaacttgcagacggcctgttgtgggacagtctctgtaatcgcgaaagcaaccatggaagacctgggggaaaacaccatggttttatccaccctgagatctttgaacaacttcatctctcagcgtgtggagggaggctctggactggatatttctacctcggccccaggttctctgcagatgcagtaccagcagagcatgcagctggaggaaagagcagagcagatccgttcgaagtcccacctcatccaggtggagcgggagaaaatgcagatggagctgagtcacaagagggctcgagtggagctggagagagcagccagcaccagtgccaggaactacgagcgtgaggtcgaccgcaaccaggagctcctgacgcgcatccggcagcttcaggagcgggaggccggggcggaggagaagatgcaggagcagctggagcgcaacaggcagtgtcagcagaacttggatgctgccagcaagaggctgcgtgagaaagaggacagtctggcccaggctggcgagaccatcaacgcactgaaggggaggatctcggaactgcagtggagcgtgatggaccaggagatgcgggtgaagcgcctggagtcggagaagcaggagctgcaggagcagctggacctgcaacacaaaaaatgccaggaagccaatcagaaaatccaggaactccaggccagccaagaagcaagagcagaccacgagcagcagattaaggatctggagcagaagctgtccctgcaagagcaggatgcagcgattgtgaagaacatgaagtctgagctggtacggctccctaggctggaacgggagctgaagcagctgcgggaggagagcgcgcacctgcgggagatgagagagaccaacgggctgctccaggaagagctggaagggctgcagaggaagctggggcgccaggagaagatgcaggagacgctggttggcttggagctggagaacgagaggctgctggccaagctgcaaagctgggagagactggaccagaccatgggcctgagcatcaggactccagaagacctttccagattcgtggttgagctgcagcagagggagcttgccttgaaggacaagaacagcgccgtcaccagcagcgcccgggggctggagaaggccaggcagcagctgcaggaggagctccggcaggtcagcggccagctgttggaggagaggaagaagcgcgagacccacgaggcgctggcccggaggctccagaaacgggtcctgctgctcaccaaggagcgggacggtatgcgggccatcctggggtcctacgacagcgagctgaccccggccgagtactcaccccagctgacgcggcgcatgcgggaggctgaggatatggtgcagaaggtgcacagccacagcgccgagatggaggctcagctgtcgcaggccctggaggagctgggaggccagaaacaaagagcagacatgctggagatggagctgaagatgctgaagtctcagtccagctctgccgaacagagcttcctgttctccagggaggaggcggacacgctcaggttgaaggtcgaggagctggaaggcgagcggagtcggctggaggaggaaaagaggatgctggaggcacagctggagcggcgagctctgcagggtgactatgaccagagcaggaccaaagtgctgcacatgagcctgaaccccaccagtgtggccaggcagcgcctgcgcgaggaccacagccagctgcaggcggagtgcgagcgactgcgcgggctcctgcgcgccatggagagaggaggcaccgtcccagccgaccttgaggctgccgccgcgagtctgccatcgtccaaggaggtggcagagctgaagaagcaggtggagagtgccgagctgaagaaccagcggctcaaggaggttttccagaccaagatccaggagttccgcaaggcctgctacacgctcaccggctaccagatcgacatcaccacggagaaccagtaccggctgacctcgctgtacgccgagcacccaggcgactgcctcatcttcaaggccaccagcccctcgggttccaagatgcagctactggagacagagttctcacacaccgtgggcgagctcatcgaggtgcacctgcggcgccaggacagcatccctgccttcctcagctcgctcaccctcgagctcttcagccgccagaccgtggcgtagcctgcaggctcgggggcatagccggagccactctgcttggcctgacctgcaggtcccctgccccgccagccacaggctgggtgcacgtcctgcctctccagccccacagggcagcagcatgactgacagacacgctgggacctacgtcgggcttcctgctggggcggccagcaccctctccacgtgcagaccccatgcgtcccggagcctggtgtgtgggcgtcggccaccagcctgggttcctcaccttgtgaaataaaatcttctcccctagacacaaaaaaaaaaaaaaaa

SEQ ID NO: 49 - DNA, 4138 bp, Homo sapiens
acttctgcaattacagacagttgcacttcaaggggacccttctttcacactacatccttctgtttttagactttttttgcgtttgaaaatgtgttttttgaggtggaatacccaactgacccctcatctctcctctctctctgctgccctgcagtgctacagttgaaactccagcagcgccggacccgggaagaactggtgagccaagggatcatgccgcctttgaaaagtccagccgcatttcatgagcagagaaggagcttggagcgggccaggacagaggactatctcaaacggaagattcgttcccggccggagagatcggagctggtcaggatgcacattttggaagagacctcggctgagccatccctccaggccaagcagctgaagctgaagagagccagactagccgatgacctcaatgagaagattgcacagaggcctggccccatggagctggtggagaagaacatccttcctgttgagtccagcctgaaggaagccatcattgtgggccaggtgaactatcccaaagtagcagacagctcttccttcgatgaggacagcagcgatgccttatcccccgagcagcctgccagccatgagtcccagggttctgtgccgtcacccctggaggcccgagtcagcgaaccactgctcagtgccacctctgcatcccccacccaggttgtgtctcaacttccgatgggccgggattccagagaaatgcttttcctggcagagcagcctcctctgcctcccccacctctgctgcctcccagcctcaccaatggaaccactatccccactgccaagtccacccccacactcattaagcaaagccaacccaagtctgccagtgagaagtcacagcgcagcaagaaggccaaggagctgaagccaaaggtgaagaagctcaagtaccaccagtacatccccccggaccagaagcaggacaggggggcaccccccatggactcatcctacgccaagatcctgcagcagcagcagctcttcctccagctgcagatcctcaaccagcagcagcagcagcaccacaactaccaggccatcctgcctgccccgccaaagtcagcaggcgaggccctgggaagcagcgggacccccccagtacgcagcctctccactaccaatagcagctccagctcgggcgcccctgggccctgtgggctggcacgtcagaacagcacctcactgactggcaagccgggagccctgccggccaacctggacgacatgaaggtggcagagctgaagcaggagctgaagttgcgatcactgcctgtctcgggcaccaaaactgagctgattgagcgccttcgagcctatcaagaccaaatcagccctgtgccaggagcccccaaggcccctgccgccacctctatcctgcacaaggctggcgaggtggtggtagccttcccagcggcccggctgagcacggggccagccctggtggcagcaggcctggctccagctgaggtggtggtggccacggtggccagcagtggggtggtgaagtttggcagcacgggctccacgccccccgtgtctcccaccccctcggagcgctcactgctcagcacgggcgatgaaaactccacccccggggacacctttggtgagatggtgacatcacctctgacgcagctgaccctgcaggcctcgccactgcagatcctcgtgaaggaggagggcccccgggccgggtcctgttgcctgagccctggggggcgggcggagctagaggggcgcgacaaggaccagatgctgcaggagaaagacaagcagatcgaggcgctgacgcgcatgctccggcagaagcagcagctggtggagcggctcaagctgcagctggagcaggagaagcgagcccagcagcccgcccccgcccccgcccccctcggcacccccgtgaagcaggagaacagcttctccagctgccagctgagccagcagcccctgggccccgctcacccattcaaccccagcctggcggccccagccaccaaccacatagacccttgtgctgtggccccggggcccccgtccgtggtggtgaagcaggaagccttgcagcctgagcccgagccggtccccgccccccagttgcttctggggcctcagggccccagcctcatcaagggggttgcacctcccaccctcatcaccgactccacagggacccaccttgtcctcaccgtgaccaataagaatgcagacagccctggcctgtccagtgggagcccccagcagccctcgtcccagcctggctctccagcgcctgccccctctgcccagatggacctggagcacccactgcagcccctctttgggacccccacttctctgctgaagaaggaaccacctggctatgaggaagccatgagccagcagcccaaacagcaggaaaatggttcctcaagccagcagatggacgacctgtttgacattctcattcagagcggagaaatttcagcagatttcaaggagccgccatccctgccagggaaggagaagccatccccgaagacagtctgtgggtcccccctggcagcacagccatcaccttctgctgagctcccccaggctgccccacctcctccaggctcaccctccctccctggacgcctggaggacttcctggagagcagcacggggctgcccctgctgaccagtgggcatgacgggccagagcccctttccctcattgacgacctccatagccagatgctgagcagcactgccatcctggaccaccccccgtcacccatggacacctcggaattgcactttgttcctgagcccagcagcaccatgggcctggacctggctgatggccacctggacagcatggactggctggagctgtcgtcaggtggtcccgtgctgagcctagcccccctcagcaccacagcccccagcctcttctccacagacttcctcgatggccatgatttgcagctgcactgggattcctgcttgtagctctctggctcaagacggggtggggaaggggctgggagccagggtactccaatgcgtggctctcctgcgtgattcggcctctccacatggttgtgagtcttgacaatcacagcccctgctttttcccttccctgggaggctagaacagagaagcccttactcctggttcagtgccacgcagggcagaggagagcagctgtcaagaagcagccctggctctcacgctggggttttggacacacggtcagggtcagggccatttcagcttgacctccttttttgaggtcagggggcactgtctgtctggctacaatttggctaaggtaggtgaagcctggccaggcgggaggcttctcttctgacccagggctgagacaggttaaggggtgaatctccttcctttctctccctgctttgctgtgaagggagaaattagcctgggcctctaccccctattccctgtgtctgccaaccccaggatcccagggctccctgccattttagtgtcttggtgtagtgtaaccatttagtggttggtggcaacaattttatgtacaggtgtatatacctctatattatatatcgacatacatatatatttttgggggggggcggacaggagatgggtgcaactccctcccatcctactctcacagaagggcctggatgcaaggttacccttgagctgtgtgccacagtctggtgcccagtctggcatgcagctacccaggcccacccatcacgtgtgattgacatgtaggtaccctgccacggcctatgccccacctgccctgcttcctggctccttatcagtgccatgagggcagaggtgctacctggccttcctgccaggagctctccacccactcacattccgtccccgccgcctcactgcagccagcgtggccctaggacaggaggagcttcgggcccagcttcaccctgcggtggggctgaggggtggccatctcctgccctggggccactggcttcacattctgggctgactcataggggagtaggggtggagtcaccaaaaccagtgctgggacaaagatggggaaggtgtgtgaactttttaaaataaacacaaaaacacaggcctgttaaaaaaaaaaaaaaaaaaaaa

SEQ ID NO: 50 - DNA, 6975 bp, Homo sapiens
aactcgggaacgggaacaggaggccgttggaaaactttgggcaagatggcccggcggtgatttccgcggcggtctctcctgcgcccggcctctgcggcgcaggcccagcccccgagcctcgcacgttcggcagccccggcctggccccggcccctcctgcccatggcggtggccgagctgtacacgcagtacaacagggtctggattcccgatcctgaagaagtttggaagtctgctgaaatagccaaggactacagagttggtgacaaggtcctgcgactcctgctggaggatggaacggagctggattattctgtcaatccagaatctctgcctccacttcggaatcctgacatcctcgtgggcgagaatgacctcacggctctcagctatcttcacgagcccgcggtgctccacaacctcagaatccgctttgcagaatccaaactcatttacacctacagtggaatcattttggtggccatgaatccttacaagcagttgccaatatacggagatgccatcatccacgcctacagcgggcagaacatgggcgatatggacccacacatatttgccgtggcagaagaggcatacaagcagatggccagaaacaacagaaaccagtccataattgtaagtggggagtcaggtgctggaaagacagtgtcggctcgctatgccatgaggtactttgccaccgtcagcaaatcgggcagcaacgctcacgtggaagacaaggtcctggcatccaatcccatcaccgaggccgttggaaatgccaagaccacccgcaatgacaatagtagtcggtttgggaaatacacagaaatcagttttgatgaacaaaatcaaattataggagccaacatgagcacttacctcctggagaaatccagagttgtctttcaatcggaaaatgaacgaaattaccacattttctatcagctttgtgcatctgcacagcagtcggaatttaaacatcttaaattggggagtgccgaagaatttaattatacaagaatgggaggcaatactgtcattgagggtgtgaatgatcgagctgaaatggtagagactcaaaagaccttcacgcttctgggtttcaaggaggattttcagatggacgtttttaaaatcctggcagccatcctacatctgggcaatgtgcagatcaccgcggtgggcaacgagaggtcctcagttagtgaggatgacagtcacctgaaggtgttctgtgagctcctgggcctggagagtggcagagttgctcagtggctgtgcaatcgcaaaatcgtcacaagctctgagacggtggtaaaacccatgaccaggcctcaggctgtcaacgccagggatgcactggccaaaaagatctatgctcacctgttcgacttcattgtggagagaattaaccaagcgttgcagttttcaggcaagcagcacacttttattggtgttttggacatttatggttttgaaacctttgatgtgaacagctttgaacaattttgcatcaattacgctaatgaaaaactgcaacaacagtttaacatgcatgtcttcaaactggaacaagaagaatacatgaaggaagatataccttggacgctgatagatttttatgacaatcaaccagttattgacctgattgaagcaaaaatgggaattctggagttactggatgaagaatgtttgttaccacatggaactgatgaaaactggcttcaaaagctgtataataattttgtcaacaggaaccctttgtttgaaaagcctagaatgtcaaacacatcctttgtcatccagcactttgctgataaggtagagtataaatgtgaaggtttcctggagaaaaacagagacaccgtctatgacatgctggttgaaatcctgagagcaagcaagtttcatctctgtgccaacttttttcaagaaaatccaactcctccttctccttttggttcaatgattacagttaaatctgcaaagcaagtcatcaagccaaacagcaagcatttccggaccacagttgggagcaagttccgcagctctctgtacttgctcatggagaccctcaatgcgacgacgccccactacgttcgatgcatcaagccaaatgatgagaagttaccctttgaatttgactccaaaagaattgttcagcagctgcgagcctgcggcgttttagaaacgattcgcattagtgcacagagctacccttccaggtggacatacatcgagttctacagtcgctacggcattctcatgaccaagcaagagctttccttcagcgataaaaaggaggtgtgcaaggtggttttacacagactcatccaggattctaatcagtaccagtttggtaaaaccaaaattttcttcagagcaggacaagtggcttatttagagaaacttcgattggataaactgaggcagagttgtgttatggtacaaaagcacatgcgtggctggctccagaggaaaaaattcctccgagagagacgagccgccctgataatccagcagtacttccggggtcagcaaactgtgaggaaagctattactgcagtggccttaaaagaagcttgggcagccataatcattcagaagcactgccgcgggtatcttgttcgcagcctgtatcagttgattcgcatggccaccatcacaatgcaggcctacagccgaggattcctggcaaggaggaggtatcgaaagatgctggaggaacataaggctgtgatcctacagaaatacgcacgggcgtggctggccagacgcagattccagagtatccgacgattcgtgcttaatattcagcttacttacagggtccagcgtttgcagaaaaagttggaagatcagaacaaagaaaaccatgggctggtggagaagctgactagcctggctgctcttcgagctggggatgtggaaaagattcagaagctggaagcagaactagaaaaagcagccactcacaggcgaaattacgaggagaaggggaagagatacagggatgctgtggaagagaaattggcaaagcttcagaagcataattcagaactggaaacacagaaagaacaaatacagctgaagcttcaagagaagactgaagagttaaaagaaaaaatggacaacctcaccaagcagctctttgatgatgtacaaaaggaagaacggcaaagaatgcttcttgaaaaaagttttgaactgaaaacacaagactatgagaagcagattcagtctttgaaagaagaaattaaagctctcaaggatgagaagatgcaactccaacacctggtggagggggagcacgtcacttctgatggcttgaaggcggaagtggcccgcctgagcaagcaggtcaagacaatctctgagttcgaaaaagagatagaactacttcaggcacagaagatagatgtggagaaacatgtgcagtcacaaaaacgggaaatgagagaaaagatgtcagagatcaccaaacaacttctcgaaagctatgacattgaagatgtaagaagcaggctctctgtggaagatctggaacatttaaatgaggatggagaactttggtttgcttatgaaggactaaagaaagcaacacgtgttttggagagccatttccagtctcagaaggattgctatgaaaaggagattgaagctttgaacttcaaagtggtgcatctcagtcaagaaatcaaccacctgcagaagttattcagagaagaaaatgacatcaatgaaagcatccgtcatgaagttaccaggctaacatcagagaacatgatgatcccagactttaaacagcaaatttcagaattggagaaacagaagcaagatcttgaaatccgcctgaatgaacaagctgagaaaatgaaaggaaaactagaagaattgtctaatcagttacatcgcagtcaagaggaggaaggaacacaaagaaaggccttggaagcccaaaatgaaatacataccaaagagaaggagaagctgattgataagattcaagaaatgcaggaggccagtgaccacttgaagaaacaatttgaaactgaaagtgaagtcaagtgtaacttccggcaggaagcatcccggctcactttggaaaacagggatcttgaagaagaattagacatgaaagacagagtgattaaaaagctacaagatcaagtcaagacactaagcaagacaattggaaaagccaatgatgtgcactcgtcctcaggacccaaggagtaccttggaatgctgcaatacaagagagaagacgaggccaagctcattcagaacctcattcttgacttgaagccccgtggcgtggtggtgaacatgatccccgggctgccggctcatatcctgttcatgtgtgtgcgctacgcagactctctgaatgatgccaacatgctgaagtccctcatgaacagcaccattaatggcatcaagcaggtggttaaggaacatttagaagactttgaaatgctgtccttttggctttccaacacttgtcattttctcaattgcctgaagcagtacagcggagaagaggaattcatgaagcataatagtccacagcagaataagaattgcttgaacaattttgacctttcagaatacagacagattctcagtgatgtggctatacgaatatatcatcaatttattatcataatggaaaagaatatccaaccgataatagttccgggaatgctggagtatgagagcctgcagggcatttccggcctgaagcccacaggcttccggaagcgctcctctagcatagacgacacggacggctacaccatgacctccgtcctgcaacagctgagctacttttacaccaccatgtgccagaacggcctggaccccgagcttgtgaggcaggcggtgaagcagctcttcttcttgatcggggcggtcacgctgaacagcctcttcctgcgcaaggacatgtgctcctgcagaaaagggatgcagatcaggtgcaatatcagctacttagaagaatggcttaaagataagaacttgcagaacagcttagcaaaggaaactttggagcccctctctcaggcagcctggttgcttcaggtcaagaagaccacagacagtgatgccaaggagatctacgaacgctgcacctcactgtctgctgtgcagatcataaagatccttaattcatacacacctatagatgactttgagaagagagtgactccatcctttgttcgcaaagtacaggctctcctaaatagccgggaggattcatcacagctgatgttggataccaaatatctctttcaagtcacatttccttttaccccctctccacatgctctggaaatgattcagatccccagcagtttcaagctaggctttctgaataggttatagcaggagaaaaagtcaatgcactttttcttcaaaagctaagtgaaggttcaatatgagggatgtgttttattaattggcagtggaaattggaatgtgatttaaggaagaaaacagacttttctcaaatggaccacatcatctctcactcacagtgacaatgctgctcctgtaattttgtaagaattcacacacaccagctgtatttggaaaagccatgtctcactctcgaatctcagctggttttcactgaaattcctggagggctcatattttcttccacgtgcctcttgatctgttctgtcttgtggcagggctctaccaggagggagtgagatctggggacacagtggcttccaagttttctaaggttcatgtgaaacctgagtacatttacaaagctgcaagtggattctagtgctgagtcttccaggaaaaaatcccgtttggccaccgtgacctgccaaaagttctcttgccccatgcctgctggggacagaaggttttcatgaactctttttactgaaaatgccctgcatttaaaaatgtttattttagacccttctaaatttttttttttttttttttttgagactccggagtctcgctctatcgccaggctggagtgtagtggcatgatctcggcttattgcaacctccgcttcctgggttcaaacaattctcctgcctcagcctcctgagtagctgggactacaggcacctgccaccacgcccagctaatttttgtatttttagtggagacaggtttcaccatgttggccaggatggcctcgatctcttgacctcgtgatccgcccacctcagcctcccaaagtgctaggattacaggcgtgtgccaccgcgcccggctgacccttttaatttttaagagtgttcaatccgagatgaatcatttgaagtatttttatatgtatatctatttaaaactaatatattattaaagcttaattgccatgccgtttatcttctctgaaagaacttcaaatcttacctgccaacatattcaccataatttttttattttttaatacctttcatacaataacttttttaaaacaacctcagattgaaaaagcaacctaaattactttcgctctctaatcagcatttcaatgtatttatttttaaattttctcaaaaagtaactaaaaaattgtgtcggaccctacttttgagaaatctacgtttcccaagttttatgggaactggctattccttgtcccggcacaccttctcattccttcctttcagagcctaaaacctcatttgataagcactcctagtctctggcctgtggatccagtgctattctgtcaccaacctaagaatcccaattgcaccttctgtttctgacagtcacaggtgacagctgtgattctataatacagactggtgtcttagaggtaggaataatacatgattatgaagcatcaccctgctaatacataataatgtctttttatattataagtgattgagtttagttcatttcaatacattgtacatgaaaaaatgaaaagtagaactttgtaatactttaatcaataaaattaattaccaaatgaa

SEQ ID NO: 51 - DNA, 7431 bp, Homo sapiens
gccttcaagtacaggccggggtccggaagcggtgataccccttctctttcccagtggccctcaaacttccttttcccgggtccttaagcgggccccgccgacagaggccaatcagagggcagcgcgagggggcggggccatagtttaaactaattgtgcgctcacagcgctggcgcgagcccacgaagaggtacgattccggagaatcgcgaggcagagcgggagcgcgcagccaggtggaaactaattctaagccagactgctggagatcaccctgttctagtgtgtggaggcttccaccaggagtctggagtgcaatggcacgatctcggctcactgcaacctccacctcccaggttcaagcgattctcctgcctcagcctcccaagtagctgggattacaggcgcattggagtgactgtctggcatcaccaagatgacactccacgccacccggggggctgcactcctctcttgggtgaacagtctacacgtggctgaccctgtggaggctgtgctgcagctccaggactgcagcatcttcatcaagatcattgacagaatccatggcactgaagagggacagcaaatcttgaagcagccggtgtcagagagactggactttgtgtgcagttttctgcagaaaaatcgaaaacatccctcttccccagaatgcctggtatctgcacagaaggtgctagagggatcagagctggaactggcgaagatgaccatgctgctcttataccactctaccatgagctccaaaagtcccagggactgggaacagtttgaatataaaattcaggctgagttggctgtcattcttaaatttgtgctggaccatgaggacgggctaaaccttaatgaggacctagagaacttcctacagaaagctcctgtgccttctacctgttctagcacattccctgaagagctctccccacctagccaccaggccaagagggagattcgcttcctagagctacagaaggttgcctcctcttccagtgggaacaactttctctcaggttctccagcttctcccatgggtgatatcctgcagaccccacagttccagatgagacggctgaagaagcagcttgctgatgagagaagtaatagggatgagctggagctggagctagctgagaaccgcaagctcctcaccgagaaggatgcacagatagccatgatgcagcagcgcattgaccgcctagccctgctgaatgagaagcaggcggccagcccactggagcccaaggagcttgaggagctgcgtgacaagaatgagagccttaccatgcggctgcatgaaaccctgaagcagtgccaggacctgaagacagagaagagccagatggatcgcaaaatcaaccagctttcggaggagaatggagacctttcctttaagctgcgggagtttgccagtcatctgcagcagctacaggatgccctcaatgagctgacggaggagcacagcaaggccactcaggagtggctagagaagcaggcccagctggagaaggagctcagcgcagccctgcaggacaagaaatgccttgaagagaagaacgaaatccttcagggaaaactttcacagctggaagaacacttgtcccagctgcaggataacccaccccaggagaagggcgaggtgctgggtgatgtcttgcagctggaaaccttgaagcaagaggcagccactcttgctgcaaacaacacacagctccaagccagggtagagatgctggagactgagcgaggccagcaggaagccaagctgcttgctgagcggggccacttcgaagaagaaaagcagcagctgtctagcctgatcactgacctgcagagctccatctccaacctcagccaggccaaggaagagctggagcaggcctcccaggctcatggggcccggttgactgcccaggtggcctctctgacctctgagctcaccacactcaatgccaccatccagcaacaggatcaagaactggctggcctgaagcagcaggccaaagagaagcaggcccagctagcacagaccctccaacagcaagaacaggcctcccagggcctccgccaccaggtggagcagctaagcagtagcctgaagcagaaggagcagcagttgaaggaggtagcggagaagcaggaggcaactaggcaggaccatgcccagcaactggccactgctgcagaggagcgagaggcctccttaagggagcgggatgcggctctcaagcagctggaggcactggagaaggagaaggctgccaagctggagattctgcagcagcaacttcaggtggctaatgaagcccgggacagtgcccagacctcagtgacacaggcccagcgggagaaggcagagctgagccggaaggtggaggaactccaggcctgtgttgagacagcccgccaggaacagcatgaggcccaggcccaggttgcagagctagagttgcagctgcggtctgagcagcaaaaagcaactgagaaagaaagggtggcccaggagaaggaccagctccaggagcagctccaggccctcaaagagtccttgaaggtcaccaagggcagccttgaagaggagaagcgcagggctgcagatgccctggaagagcagcagcgttgtatctctgagctgaaggcagagacccgaagcctggtggagcagcataagcgggaacgaaaggagctggaagaagagagggctgggcgcaaggggctggaggctcgattacagcagcttggggaggcccatcaggctgagactgaagtcctgcggcgggagctggcagaggccatggctgcccagcacacagctgagagtgagtgtgagcagctcgtcaaagaagtagctgcctggcgtgagcggtatgaggatagccagcaagaggaggcacagtatggcgccatgttccaggaacagctgatgactttgaaggaggaatgtgagaaggcccgccaggagctgcaggaggcaaaggagaaggtggcaggcatagaatcccacagcgagctccagataagccggcagcagaacgaactagctgagctccatgccaacctggccagagcactccagcaggtccaagagaaggaagtcagggcccagaagcttgcagatgacctctccactctgcaggaaaagatggctgccaccagcaaagaggtggcccgcttggagaccttggtgcgcaaggcaggtgagcagcaggaaacagcctcccgggagttagtcaaggagcctgcgagggcaggagacagacagcccgagtggctggaagagcaacagggacgccagttctgcagcacacaggcagcgctgcaggctatggagcgggaggcagagcagatgggcaatgagctggaacggctgcgggccgcgctgatggagagccaggggcagcagcaggaggagcgtgggcagcaggaaagggaggtggcgcggctgacccaggagcggggccgtgcccaggctgaccttgccctggagaaggcggccagagcagagcttgagatgcggctgcagaacgccctcaacgagcagcgtgtggagttcgctaccctgcaagaggcactggctcatgccctgacggaaaaggaaggcaaggaccaggagttggccaagcttcgtggtctggaggcagcccagataaaagagctggaggaacttcggcaaaccgtgaagcaactgaaggaacagctggctaagaaagaaaaggagcacgcatctggctcaggagcccaatctgaggctgctggcaggacagagccaacaggccccaagctggaggcactgcgggcagaggtgagcaagctggaacagcaatgccagaagcagcaggagcaggctgacagcctggaacgcagcctcgaggctgagcgggcctcccgggctgagcgggacagtgctctggagactctgcagggccagttagaggagaaggcccaggagctagggcacagtcagagtgccttagcctcggcccaacgggagttggctgccttccgcaccaaggtacaagaccacagcaaggctgaagatgagtggaaggcccaggtggcccggggccggcaagaggctgagaggaaaaatagcctcatcagcagcttggaggaggaggtgtccatcctgaatcgccaggtcctggagaaggagggggagagcaaggagttgaagcggctggtgatggccgagtcagagaagagccagaagctggaggagaggctgcgcctgctgcaggcagagacagccagcaacagtgccagagctgcagaacgcagctctgctctgcgggaggaggtgcagagcctccgggaggaggctgagaaacagcgggtggcttcagagaacctgcggcaggagctgacctcacaggctgagcgtgcggaggagctgggccaagaattgaaggcgtggcaggagaagttcttccagaaagagcaggccctctccaccctgcagctcgagcacaccagcacacaggccctggtgagtgagctgctgccagctaagcacctctgccagcagctgcaggccgagcaggccgctgccgagaaacgccaccgtgaggagctggagcagagcaagcaggccgctgggggactgcgggcagagctgctgcgggcccagcgggagcttggggagctgattcctctgcggcagaaggtggcagagcaggagcgaacagctcagcagctgcgggcagagaaggccagctatgcagagcagctgagcatgctgaagaaggcgcatggcctgctggcagaggagaaccgggggctgggtgagcgggccaaccttggccggcagtttctggaagtggagttggaccaggcccgggagaagtatgtccaagagttggcagccgtacgtgctgatgctgagacccgtctggctgaggtgcagcgagaagcacagagcactgcccgggagctggaggtgatgactgccaagtatgagggtgccaaggtcaaggtcctggaggagaggcagcggttccaggaagagaggcagaaactcactgcccaggtggaagaactgagtaagaaactggctgactctgaccaagccagcaaggtgcagcagcagaagctgaaggctgtccaggctcagggaggcgagagccagcaggaggcccagcgcctccaggcccagctgaatgaactgcaagcccagttgagccagaaggagcaggcagctgagcactataagctgcagatggagaaagccaaaacacattatgatgccaagaagcagcagaaccaagagctgcaggagcagctgcggagcctggagcagctgcagaaggaaaacaaagagctgcgagctgaagctgaacggctgggccatgagctacagcaggctgggctgaagaccaaggaggctgaacagacctgccgccaccttactgcccaggtgcgcagcctggaggcacaggttgcccatgcagaccagcagcttcgagacctgggcaaattccaggtggcaactgatgctttaaagagccgtgagccccaggctaagccccagctggacttgagtattgacagcctggatctgagctgcgaggaggggaccccactcagtatcaccagcaagctgcctcgtacccagccagacggcaccagcgtccctggagaaccagcctcacctatctcccagcgcctgccccccaaggtagaatccctggagagtctctacttcactcccatccctgctcggagtcaggcccccctggagagcagcctggactccctgggagacgtcttcctggactcgggtcgtaagacccgctccgctcgtcggcgcaccacgcagatcatcaacatcaccatgaccaagaagctagatgtggaagagccagacagcgccaactcatcgttctacagcacgcggtctgctcctgcttcccaggctagcctgcgagccacctcctctactcagtctctagctcgcctgggttctcccgattatggcaactcagccctgctcagcttgcctggctaccgccccaccactcgcagttctgctcgtcgttcccaggccggggtgtccagtggggcccctccaggaaggaacagcttctacatgggcacttgccaggatgagcctgagcagctggatgactggaaccgcattgcagagctgcagcagcgcaatcgagtgtgccccccacatctgaagacctgctatcccctggagtccaggccttccctgagcctgggcaccatcacagatgaggagatgaaaactggagacccccaagagaccctgcgccgagccagcatgcagccaatccagatagccgagggcactggcatcaccacccggcagcagcgcaaacgggtctccctagagccccaccagggccctggaactcctgagtctaagaaggccaccagctgtttcccacgccccatgactccccgagaccgacatgaagggcgcaaacagagcactactgaggcccagaagaaagcagctccagcttctactaaacaggctgaccggcgccagtcgatggccttcagcatcctcaacacacccaagaagctagggaacagccttctgcggcggggagcctcaaagaaggccctgtccaaggcttcccccaacactcgcagtggaacccgccgttctccgcgcattgccaccaccacagccagcgccgccactgctgccgccattggtgccacccctcgagccaagggcaaggcaaagcactaaagggccagtaccagtgagtggccccacctgtgtccccgatgctgacctcacctggtcctccgcctactgtccctctcagtgccttctctcagctcccaggccaacagtagccaaacccctagagacagtgatgcctgcccgcaccctggcctggtccctggtccttcactggcgccttctcggagctggcccagggggcctggagcatggacagtgtgggcgctctccctaccttgcctccttttttcttaaagcaaagtcacttctccatcacaaccagatttgaggctggttttgatggctgggtccttgggcctggccagtcttcctcttagcctctggatctagaagggaccataagaggagtaggccctggttcctgctgtcctggtggctgggcccagcaggggccctcactcttgaagtccaggactgggtctgacctggtgggagcacctgccagaggatgctctttcccaggacggatgggccctatgtctcaggagtggggttgggggacagccttcagcagcagctcacaccctaccttccccagacttgcactggggtgggatttggagtgatgggaaggtttttaagggccggggatggatcttttctaaatgttattacttgtaaataaagtctatttttctcccgtgaaaaaaaaaaaaaaaaaaaaaaaaaaa

SEQ ID NO: 52 - DNA, 6574 bp, Homo sapiens
aagagcaaaaagcgaaggcgcaatctggacactgggagattcggagcgcagggagtttgagagaaacttttattttgaagagaccaaggttgagggggggcttatttcctgacagctatttacttagagcaaatgattagttttagaaggatggactataacattgaatcaattacaaaacgcggtttttgagcccattactgttggagctacagggagagaaacagaggaggagactgcaagagatcattggaggccgtgggcacgctctttactccatgtgtgggacattcattgcggaataacatcggaggagaagtttcccagagctatggggacttcccatccggcgttcctggtcttaggctgtcttctcacagggctgagcctaatcctctgccagctttcattaccctctatccttccaaatgaaaatgaaaaggttgtgcagctgaattcatccttttctctgagatgctttggggagagtgaagtgagctggcagtaccccatgtctgaagaagagagctccgatgtggaaatcagaaatgaagaaaacaacagcggcctttttgtgacggtcttggaagtgagcagtgcctcggcggcccacacagggttgtacacttgctattacaaccacactcagacagaagagaatgagcttgaaggcaggcacatttacatctatgtgccagacccagatgtagcctttgtacctctaggaatgacggattatttagtcatcgtggaggatgatgattctgccattataccttgtcgcacaactgatcccgagactcctgtaaccttacacaacagtgagggggtggtacctgcctcctacgacagcagacagggctttaatgggaccttcactgtagggccctatatctgtgaggccaccgtcaaaggaaagaagttccagaccatcccatttaatgtttatgctttaaaagcaacatcagagctggatctagaaatggaagctcttaaaaccgtgtataagtcaggggaaacgattgtggtcacctgtgctgtttttaacaatgaggtggttgaccttcaatggacttaccctggagaagtgaaaggcaaaggcatcacaatgctggaagaaatcaaagtcccatccatcaaattggtgtacactttgacggtccccgaggccacggtgaaagacagtggagattacgaatgtgctgcccgccaggctaccagggaggtcaaagaaatgaagaaagtcactatttctgtccatgagaaaggtttcattgaaatcaaacccaccttcagccagttggaagctgtcaacctgcatgaagtcaaacattttgttgtagaggtgcgggcctacccacctcccaggatatcctggctgaaaaacaatctgactctgattgaaaatctcactgagatcaccactgatgtggaaaagattcaggaaataaggtatcgaagcaaattaaagctgatccgtgctaaggaagaagacagtggccattatactattgtagctcaaaatgaagatgctgtgaagagctatacttttgaactgttaactcaagttccttcatccattctggacttggtcgatgatcaccatggctcaactgggggacagacggtgaggtgcacagctgaaggcacgccgcttcctgatattgagtggatgatatgcaaagatattaagaaatgtaataatgaaacttcctggactattttggccaacaatgtctcaaacatcatcacggagatccactcccgagacaggagtaccgtggagggccgtgtgactttcgccaaagtggaggagaccatcgccgtgcgatgcctggctaagaatctccttggagctgagaaccgagagctgaagctggtggctcccaccctgcgttctgaactcacggtggctgctgcagtcctggtgctgttggtgattgtgatcatctcacttattgtcctggttgtcatttggaaacagaaaccgaggtatgaaattcgctggagggtcattgaatcaatcagcccagatggacatgaatatatttatgtggacccgatgcagctgccttatgactcaagatgggagtttccaagagatggactagtgcttggtcgggtcttggggtctggagcgtttgggaaggtggttgaaggaacagcctatggattaagccggtcccaacctgtcatgaaagttgcagtgaagatgctaaaacccacggccagatccagtgaaaaacaagctctcatgtctgaactgaagataatgactcacctggggccacatttgaacattgtaaacttgctgggagcctgcaccaagtcaggccccatttacatcatcacagagtattgcttctatggagatttggtcaactatttgcataagaatagggatagcttcctgagccaccacccagagaagccaaagaaagagctggatatctttggattgaaccctgctgatgaaagcacacggagctatgttattttatcttttgaaaacaatggtgactacatggacatgaagcaggctgatactacacagtatgtccccatgctagaaaggaaagaggtttctaaatattccgacatccagagatcactctatgatcgtccagcctcatataagaagaaatctatgttagactcagaagtcaaaaacctcctttcagatgataactcagaaggccttactttattggatttgttgagcttcacctatcaagttgcccgaggaatggagtttttggcttcaaaaaattgtgtccaccgtgatctggctgctcgcaacgtcctcctggcacaaggaaaaattgtgaagatctgtgactttggcctggccagagacatcatgcatgattcgaactatgtgtcgaaaggcagtacctttctgcccgtgaagtggatggctcctgagagcatctttgacaacctctacaccacactgagtgatgtctggtcttatggcattctgctctgggagatcttttcccttggtggcaccccttaccccggcatgatggtggattctactttctacaataagatcaagagtgggtaccggatggccaagcctgaccacgctaccagtgaagtctacgagatcatggtgaaatgctggaacagtgagccggagaagagaccctccttttaccacctgagtgagattgtggagaatctgctgcctggacaatataaaaagagttatgaaaaaattcacctggacttcctgaagagtgaccatcctgctgtggcacgcatgcgtgtggactcagacaatgcatacattggtgtcacctacaaaaacgaggaagacaagctgaaggactgggagggtggtctggatgagcagagactgagcgctgacagtggctacatcattcctctgcctgacattgaccctgtccctgaggaggaggacctgggcaagaggaacagacacagctcgcagacctctgaagagagtgccattgagacgggttccagcagttccaccttcatcaagagagaggacgagaccattgaagacatcgacatgatggatgacatcggcatagactcttcagacctggtggaagacagcttcctgtaactggcggattcgaggggttccttccacttctggggccacctctggatcccgttcagaaaaccactttattgcaatgcagaggttgagaggaggacttggttgatgtttaaagagaagttcccagccaagggcctcggggagcgttctaaatatgaatgaatgggatattttgaaatgaactttgtcagtgttgcctcttgcaatgcctcagtagcatctcagtggtgtgtgaagtttggagatagatggataagggaataataggccacagaaggtgaactttgtgcttcaaggacattggtgagagtccaacagacacaatttatactgcgacagaacttcagcattgtaattatgtaaataactctaaccaaggctgtgtttagattgtattaactatcttctttggacttctgaagagaccactcaatccatccatgtacttccctcttgaaacctgatgtcagctgctgttgaactttttaaagaagtgcatgaaaaaccatttttgaaccttaaaaggtactggtactatagcattttgctatcttttttagtgttaaagagataaagaataataattaaccaaccttgtttaatagatttgggtcatttagaagcctgacaactcattttcatattgtaatctatgtttataatactactactgttatcagtaatgctaaatgtgtaataatgtaacatgatttccctccagagaaagcacaatttaaaacaatccttactaagtaggtgatgagtttgacagtttttgacatttatattaaataacatgtttctctataaagtatggtaatagctttagtgaattaaatttagttgagcatagagaacaaagtaaaagtagtgttgtccaggaagtcagaatttttaactgtactgaataggttccccaatccatcgtattaaaaaacaattaactgccctctgaaataatgggattagaaacaaacaaaactcttaagtcctaaaagttctcaatgtagaggcataaacctgtgctgaacataacttctcatgtatattacccaatggaaaatataatgatcagcaaaaagactggatttgcagaagttttttttttttttttcttcatgcctgatgaaagctttggcgaccccaatatatgtattttttgaatctatgaacctgaaaagggtcagaaggatgcccagacatcagcctccttctttcaccccttaccccaaagagaaagagtttgaaactcgagaccataaagatattctttagtggaggctggatgtgcattagcctggatcctcagttctcaaatgtgtgtggcagccaggatgactagatcctgggtttccatccttgagattctgaagtatgaagtctgagggaaaccagagtctgtatttttctaaactccctggctgttctgatcggccagttttcggaaacactgacttaggtttcaggaagttgccatgggaaacaaataatttgaactttggaacagggttggcattcaaccacgcaggaagcctactatttaaatccttggcttcaggttagtgacatttaatgccatctagctagcaattgcgaccttaatttaactttccagtcttagctgaggctgagaaagctaaagtttggttttgacaggttttccaaaagtaaagatgctacttcccactgtatgggggagattgaactttccccgtctcccgtcttctgcctcccactccataccccgccaaggaaaggcatgtacaaaaattatgcaattcagtgttccaagtctctgtgtaaccagctcagtgttttggtggaaaaaacattttaagttttactgataatttgaggttagatgggaggatgaattgtcacatctatccacactgtcaaacaggttggtgtgggttcattggcattctttgcaatactgcttaattgctgataccatatgaatgaaacatgggctgtgattactgcaatcactgtgctatcggcagatgatgctttggaagatgcagaagcaataataaagtacttgactacctactggtgtaatctcaatgcaagccccaactttcttatccaactttttcatagtaagtgcgaagactgagccagattggccaattaaaaacgaaaacctgactaggttctgtagagccaattagacttgaaatacgtttgtgtttctagaatcacagctcaagcattctgtttatcgctcactctcccttgtacagccttattttgttggtgctttgcattttgatattgctgtgagccttgcatgacatcatgaggccggatgaaacttctcagtccagcagtttccagtcctaacaaatgctcccacctgaatttgtatatgactgcatttgtgtgtgtgtgtgtgttttcagcaaattccagatttgtttccttttggcctcctgcaaagtctccagaagaaaatttgccaatctttcctactttctatttttatgatgacaatcaaagccggcctgagaaacactatttgtgactttttaaacgattagtgatgtccttaaaatgtggtctgccaatctgtacaaaatggtcctatttttgtgaagagggacataagataaaatgatgttatacatcaatatgtatatatgtatttctatatagacttggagaatactgccaaaacatttatgacaagctgtatcactgccttcgtttatatttttttaactgtgataatccccacaggcacattaactgttgcacttttgaatgtccaaaatttatattttagaaataataaaaagaaagatacttacatgttcccaaaacaatggtgtggtgaatgtgtgagaaaaactaacttgatagggtctaccaatacaaaatgtattacgaatgcccctgttcatgtttttgttttaaaacgtgtaaatgaagatctttatatttcaataaatgatatataatttaaagtta

SEQ ID NO: 53 - DNA, 6411 bp, Homo sapiens
ccgcgacccgggcggggagggcgtgtgtcgggggggcggtggcggcgaggcgggcgcgcgggatggaacactgagacaccgacggaatgctccgaatcgccacataatcccctggaacggccgcgcacaacgccattggcttctcccttctccgcgcgccgccgccgtctcccacctccgcctcatcgcctccctctccgcccgctgcctccggagctgggggggaaacgcgaagccccactgcaatggagcccgccgccgcggccacggtacagcgactccccgagctcggcagggaggaccgagcttcggctccggcggccgccgctgcggcagcagcagcagcagcggcggccgcggcggctctggcggcggcggccgggggcggccggagtccggagcccgcgctgaccccggcggccccgagcggcgggaacggcagcggcagcggggcgcgggaagaggccccaggcgaggcgccgccggggccgctgccgggcagagcggggggtgccgggcgcaggaggcggcgcggggcgccccagcccattgccggcggggctgcccccgtacccggggccggcggcggcgccaactccctcctgctgaggagagggcggctgaagaggaatctgtccgcggccgccgcggccgcctcctcgtcgtcgtcgtcctcggccgctgctgcctcgcactcccccggcgctgccggcctccccgcctcctgctcggcctcggcgtcgctgtgcacccggagcctggacaggaagacgctgcttctgaagcaccggcagacgctgcagctgcagccgtcggaccgggactgggtgaggcaccagctccagcgcggctgcgtgcacgtcttcgaccgccacatggcctcgacctacctgcgcccggtgctctgcacactggacaccacggccggcgaggtggccgcccgcctgctgcagctgggccacaaaggcggcggcgtggtgaaggtgctgggccaggggcccggagccgccgccgcccgggagcccgctgaaccgccccccgaggccggcccccggctggcgcccccggagccgcgggactcggaggtaccgcccgcgaggagcgcgccgggtgccttcggggggcctccgcgcgcgccccccgccgacctacccctgcccgtcggcggcccgggcgggtggtcgcgccgcgccagcccagcgccctcggactccagccccggcgagccgttcgttgggggccctgtctcttcgccccgcgccccacggcctgtggtctccgacaccgagagcttcagtctgagtcccagcgccgagagcgtgtctgaccggttggacccctacagcagcggcggcggctcctcgtcgtcgtcggaagagctcgaggccgacgcagcctcggccccgacgggggtcccgggccagccccgccgtcccggccaccccgcgcagcccctcccgcttccccagacggcttcctcgcctcagccgcagcagaaagccccgagggccattgacagcccgggcggggccgtccgcgaggggtcgtgcgaggagaaggcagcggcagccgtggccccgggaggcctccagtctacccccgggaggagcggggtgaccgcggagaaggcgcctccgccgcccccgccgcccaccctgtacgtgcagctccacggagagaccacccggcgcttggaggcggaggagaagccattgcagatccaaaatgactacctcttccaactgggatttggggagctgtggagggtgcaggaggaaggcatggactcggagattggctgcctcatccgcttctatgcaggaaaacctcacagcacgggtagctctgaacggattcagctctcaggaatgtataatgtccgtaaaggcaagatgcagttgccagtgaaccgatggacaagacgccaagtcatcctatgtgggacctgcctgatagtatcatctgtgaaagacagcttgaccggaaagatgcatgttctgccactaattggtggaaaagtagaagaagtgaaaaagcaccaacactgtttagcatttagctcctctggaccccaaagccagacttactacatttgctttgatactttcacagaatacttaaggtggctgcgacaagtctccaaggttgcatcccagcgcattagctcagtggacctctcgtgttgtagcctggaacatctgcctgccaacctcttctacagccaagacctcactcatctcaatttaaaacaaaacttcctaaggcagaaccctagccttccagctgccagggggcttaatgaactgcaaaggttcaccaagttgaagagtcttaacctttccaataatcatttaggggacttcccactggcagtctgcagtattccaaccctggcagagctgaacgtgtcctgcaatgccctgcgatcagtcccggcagccgttggagtgatgcacaacttacagacatttttgttggatggaaactttctccaatcccttcctgctgagttggagaacatgaagcagcttagttatctgggtctttctttcaatgaatttactgacattcccgaagtattggagaaattgactgctgtggataaactttgtatgtctggaaactgtgtggagacccttaggctacaggctttaagaaaaatgcctcacattaaacatgtggatctaaggttgaacgtaattaggaagctgatagcagatgaagtggactttctacagcatgttactcagcttgacctacgagacaataagcttggtgatctagatgctatgattttcaacaacattgaagttttacactgtgaaaggaatcaactggtcacattagacatctgtggctatttcctaaaagcgctctatgcctcttctaatgaacttgttcaacttgatgtttacccagttccaaattatctgtcctacatggatgtttcaaggaaccgcttagaaaatgtgcctgagtgggtatgtgaaagccgaaagctagaagttttggatattggccataatcaaatatgtgaacttcctgcccgcttattttgtaatagcagtctccggaaactactggcaggacacaaccagttggcaaggctgcctgaaaggctagaaagaacctcggtggaggtcttggatgtgcaacacaaccagctccttgagctcccacctaaccttctgatgaaggctgacagcctgagattcctgaacgcctctgcgaacaaactggaaagccttcctccagccacgctttccgaagagacaaacagtatcttacaagagttgtatttgacaaataacagcctcacagacaaatgtgtgcccttgttaacgggacacccccatttgaagatccttcacatggcctataaccgacttcagagttttccagcaagtaaaatggcgaaactggaggaacttgaagaaattgatctcagtgggaataagctgaaagccatcccaacaacgatcatgaattgcaggcgcatgcacaccgtgattgctcactccaactgcatcgaggtctttcccgaagttatgcagctcccagagatcaagtgtgtggacctgagctgtaatgagctaagtgaagtcacattaccagaaaacctgcctcccaaactgcaggagctagacctgactggaaacccgcgccttgtccttgatcacaaaaccctggaactactgaataatatccgctgtttcaagattgatcagccttctacaggagacgcttccggagccccagctgtatggagtcatggttacactgaagcttcgggggtaaaaaacaagttgtgtgtcgcagccctgtcggtgaataacttctgtgacaaccgcgaagccctgtatggtgtgtttgacggagaccggaatgtggaggtgccctaccttctccagtgcactatgagtgacattttggctgaagagctgcaaaaaacaaaaaacgaagaagaatacatggtcaatacattcattgtcatgcaaaggaaacttggaactgctgggcagaagcttggtggtgccgctgtcctttgtcatatcaagcatgaccctgtggatccaggaggatccttcaccttgacctctgctaatgtgggcaagtgccaaacagttctctgtcgaaatggaaagccgctgcctctgtccagatcttacatcatgagctgtgaagaagagctgaagaggattaaacagcacaaggccattatcactgaggatggcaaggtgaacggagtgactgagtccacgcgcatcctgggctacaccttcctccatcccagtgtggtgcctcgcccccacgtgcagtccgtgctcctgactccccaggatgagttcttcatcctaggcagtaaggggttgtgggacagcctgtccgtcgaggaggccgtggaagccgtgcgcaacgtgcccgatgccctggctgctgccaagaagctgtgtaccctggcccagagctacggctgccacgacagcatcagcgctgtggtggtgcagctcagtgtcactgaggacagcttctgctgctgcgagctcagcgccggtggggctgtgccaccacccagtcctggcatctttcctccctcagtgaacatggtgatcaaggatcggccctcagatgggctgggcgtgccgtcctccagcagcggcatggcttccgagattagcagtgagctctccacttctgagatgagcagcgaggtggggtcaacagcctccgatgagcccccgcccggagccctaagcgagaacagccctgcctaccccagtgagcagcgctgcatgctccaccccatctgtctgtccaactccttccagcgccagctatccagcgccacgttctctagcgccttctccgacaacggccttgacagtgacgatgaggagcccatcgagggcgtcttcaccaacggcagccgggtggaggtggaggtggacatccactgcagccgggccaaggagaaggagaaacagcagcacctgcttcaggtgccagcagaggccagtgatgagggcattgtcatcagcgccaacgaggatgagccaggtctgcccaggaaggcagacttctctgccgttgggaccattgggcgccggagggccaatggctctgttgcgccccaggaaaggagccacaatgtgatagaggtggctacagacgcacctcttcgaaagcctggaggctattttgctgccccggctcagccggatcctgatgatcagtttatcatacccccggagctggaagaggaggtcaaagaaatcatgaagcatcaccaggagcaacagcagcagcagcagccgccaccaccccctcagctccagccgcagctgccgcggcactaccagctggaccagctgccagattattacgacacgccactatgacccagccgagctgtttaacaaataaactaaccacaaaagactgagttgcaagagtctcccaggctcacattaaaccaggggttttactccacatccttcccccagacactgttcccaacctgtcatcgcagctaatctgtaggttctctttctttgggttatttttttaagtaatcaccactttcttctagtgatgctttaccaatatgatttacatttgttaacttctccccctaacatatcagatatgtaaagacaaagaacaaaaggtttaatatattacagagaaacagttaatgataatgtaatattttttaaaatggctttttgttgtttgtttggaaggcagggcaggctgccgttgctaaatgatttaataatattgtaattctgtatttctttggggggaaaaggcttttgttttgttttgttttgttttgttttgtttttgtcttgaaaataatagacatttgtagaatatggagactaactcctaggagttgctttactctgtcaggtgacttaagtcactgggattcactaattttctctgagagaacagctgattgagaatttccattgtaaatagctcagtgttgtatagtgaggcttacgatgttttgtagtcttggcgtaaggacacagcccaagtaactgacgtttcccctccccctcccctctgaggagcctgcctgcctcacaactcaccctcacttcactgaatgaggaggctgagcagctgcagtgtttctgtccggaggaaatggatcttaggccactggacaagaacctgcacccaagggccctgaacccattttcctcccctgtcccagccttcccactttgacagacacttttaactgtgttccttactgctgccacaatcagcatggttgtatagtgccccattaggccatttacatacccagagttatactcaagcagaatgcacaaatggacatgtcataatttttgttacaataaatatgaaatttacaagtatttacaagta

SEQ ID NO: 54 - DNA, 7606 bp, Homo sapiens
aagaatcagaagacatttgtgctttggggagcagaggccctcagggtatagagaaggaagaagagagaggttcactgtagtcctgaagcagaaataagacctgtggctgaaggaagccttagcaattcactccttcctcttcctgagaactctctgtaggaagtctcacctagcagaggcttcacagtatttcagagaagccaaagattgtttgcctctttggaaactgttatccttccatcatgactgtgtcactcctgccactgttccaccatagagatggcgtcctttgcagcaaaccgtaagttataaggatgagggaagaagagtagagggccaaaaggattccattttgaggaaaaactacagtttgccttgccaggtagaagaatcaggcgcccagacaccatgtcacaaccctccagaactgacgttggcaggaagtagagactttgttgcctgtgtcccccatcctcaccatgtcttcgactcagggcaatggggaacactggaagtccctggagtcagtgggcatcagccgcaaagagctagcgatggccgaagccctgcagatggagtatgatgccctgtcccggctccggcatgacaaggaggagaacagagccaagcagaacgcagacccctctctcatcagctgggatgagcctggggtagacttttacagcaagccagcaggaaggcggaccgacctcaagctgttacgcggtctctctggctctgatcctacccttaactacaactcactctccccacaggaagggccgcccaaccactctacctcccaagggccacagcctggctcagatccctggcccaaaggctccctgtctggagactatctctacatttttgatggttcagatgggggagtctcttcgtccccaggaccaggggacatagagggctcttgcaagaaactatccccacctcctctgcctccccgagcttctatctgggatacccctcccctgcctcccagaaaggggtccccctcatcctccaagatctcccagcccagtgacatcaacactttctctttggtcgaacaattgccgggcaaactgctagagcatcggatcctagaagaggaagaggtgctgggaggtgggggtcaggggcgcctactggggtctgtggactatgatggtatcaatgatgcaattactaggctcaacttgaaatcgacctatgatgcggagatgttgcgggatgccaccaggggctggaaggagggccgagggccgctggacttcagcaaagacacctctggaaaacccgtggccaggagcaagactatgccccctcaggtgcccccccgcacctatgcctcccgctatggcaaccgaaagaatgcgacgcctggcaagaaccgccggatttctgcagccccggtgggctcccggccccacactgttgccaatggccatgagttgtttgaggtctcagaagagagagatgaggaggttgctgcattttgccacatgctggatatccttcgatctggctctgacatccaagactacttcctcactggctatgtctggagtgctgtcacccctagcccagagcacctcggggatgaggtcaacctgaaggtgactgtgttgtgtgacaggcttcaagaggcactcactttcacctgcaactgttcctccactgtagacttgcttatctaccagaccctgtgctacacccatgatgacctgaggaatgtggacgtgggtgactttgtgctaaagccctgcgggctggaggagttcctgcagaacaagcatgccttgggcagtcatgagtacatccaatactgccgcaagtttgacattgacattcggctacagctgatggagcagaaggttgtgcgcagtgacctggcccggacggtgaatgatgaccagagcccctccaccttgaactacctcgtccatctccaagagaggcctgtcaagcagaccatcagcaggcaggccctgagtcttctgttcgacacttaccacaatgaggtggatgccttcctgctggctgatggagacttcccactgaaggctgacagggtggtccagtccgtcaaggccatctgcaacgccctggccgccgtggaaacccctgagatcaccagtgctctcaaccagctgcccccctgcccctcccgcatgcagcctaaaattcagaaggatcccagtgtcttggctgtgagggaaaaccgagagaaggtcgtggaagccctgaccgctgccatcttggacctggtggagctgtactgcaacacattcaacgcagacttccagacggcagtgcccgggagccgcaagcatgacctggtccaggaggcctgccatttcgccaggtccctggccttcactgtctatgccacccaccgcatccccatcatctgggctaccagctatgaagatttctacctctcctgctccctcagccatggcggcaaggagctgtgcagccccctgcagacccgaagagctcacttctccaagtacctcttccacctcatcgtctgggaccagcagatctgcttcccagtgcaggtgaaccggctgcctcgggagacactgctgtgtgccactctctatgctctgcccatccccccaccggggagctcctcagaggccaataagcagcggcgggtgcctgaagccctgggctgggtcactaccccactcttcaacttcaggcaggtcctgacctgtggccggaagcttctgggtttgtggccagcaacacaggaaaatcccagcgcccgttggagtgcacctaatttccaccagccagacagtgtcatcctgcagattgacttccccacctcggcctttgacatcaagttcaccagcccccctggagacaagttcagcccccgctatgagtttggcagcctccgggaagaagaccagcgcaagcttaaagacatcatgcagaaagagtccttgtactggctcactgatgctgacaagaagcgcctgtgggagaagcgatattactgccactcggaggtgagctcgctccccctggtgctcgccagcgcccccagctgggagtgggcttgcctgcctgacatctatgttctcctgaagcagtggacccacatgaaccaccaggatgccctggggctcctgcatgccaccttcccggaccaggaggtgcgtcgtatggctgtgcagtggattggctcactctcagatgctgagctgctagactacctgccccagctggtacaggccctgaagtatgaatgctacctggacagcccgttggtgcgcttcctcctgaaacgagctgtgtctgacttgagagtgactcactacttcttctggttactgaaggacggcctcaaggactctcagttcagcatccgctaccagtatctgctggcagccttactgtgctgctgtggcaaggggctgagagaagagtttaaccgccagtgctggcttgtcaatgccctggccaaactggcccagcaggtccgggaggcagccccatctgcaaggcagggaatcctccgcacgggcctggaggaggtgaagcagttctttgccctcaatggctcgtgccgcttgccactcagccccagtctgctggttaagggaattgtgcccagggactgttcctacttcaactccaatgctgtccccctcaaactctccttccaaaatgtggatcccctgggtgagaacatccgtgtcatcttcaagtgtggggacgaccttcgccaggacatgctaacgctgcagatgattcgcatcatgagcaagatctgggtccaggaggggctggacatgcgcatggtcatcttccgctgcttctccaccggccggggcagagggatggtggagatgatccctaatgctgagaccctgcgtaagatccaggtggagcatggggtgaccggctcgttcaaggaccggcccctggcagactggctgcagaaacacaaccctggggaggacgagtatgagaaggctgtggagaactttatctactcctgcgctggctgctgcgtggccacgtacgtcttgggcatctgtgaccgacataatgacaacatcatgctgaagaccactggtcacatgttccacattgattttggccgcttcctgggccatgcccagatgtttggcaacatcaagcgggaccgtgccccctttgtcttcacctcggacatggcgtatgtcatcaacgggggtgacaagccttccagccgcttccatgattttgttgacctttgctgccaagcctacaacctcattcgcaagcacacccacctcttcctcaaccttctgggcctgatgttgtcctgtgggatccctgaactctcagacctggaggacctcaagtatgtgtacgatgccctgaggcctcaggatacagaggccaatgccactacctacttcactaggttgattgagtccagcctgggcagtgtagccacaaagctcaattttttcatccataatctggctcagatgaagttcacgggctcagatgaccggctgaccctctcctttgcctcccgaacacacactctcaagagctctggccgaatcagtgatgttttcctctgccgccatgagaagatcttccaccccaacaaaggctatatatatgtggtaaaggtgatgcgagagaacactcacgaggccacctacatccagcggacctttgaggagttccaggaattacacaataagttgcggctgctcttcccttcttcccacttgcccagcttccctagtcgcttcgtgatcggccgctcccggggagaggcggtggccgagcggcggagggaggagctaaacggttacatctggcacttgatccacgcaccccctgaggtggccgagtgtgatttggtgtacaccttcttccacccactgccccgggatgagaaggctatgggcaccagcccagctcctaagtcctcagatggcacatgggcccggcccgtcggaaaggtgggaggggaggtgaagctgtccatctcctacaaaaacaataaactcttcatcatggtgatgcatattcggggcttgcaactgctccaggatggaaatgaccctgacccctatgtgaaaatttacctccttcctgaccctcagaaaaccactaagaggaaaaccaaagtggcccggaaaacctgcaatcctacctacaatgagatgttggtatatgatgggatccccaagggtgacctgcagcagcgggagctccagctgagcgtgctgagtgagcagggattctgggagaacgtcctcctcggtgaggtgaacatccgcctgcgagagctggacctggctcaggagaagaccggctggttcgccctgggatctcgaagtcatggcaccttgtgagcccagcagagccaccacccagcatcccaggctggtggcaggagctgggggagaggactctcccctgtgagactcctccttgtgaagggccagggccctgggcaggcctccagctcggtccaggtgattctggcctctgtggtaggaggcagggagagtaagacatgctctgctgtctcttcctctggagactgaacttgggttggttgtgatgagcagccccttggaggctgtgaggttgcagcaaagttttaagtttaccttgtgtcaagggagcaatgcttggtttggggagtgtgtggggtgggctgtatgaagtagcattttgggggtgggtgggtggatatcttaatttttatttttaaaaaatgaaatagtgatgttgtcctaactgggacaggaagccttgcgagaagggacgtacctatgccccagaaggcaagagaggaagactatttggactttttgtatgattaaggttcttattggacttttccctaggttttttttttttgttattgttgttgttgtttcgttttctagctataggaactatctggggaggggcccagtgggtcctcggccagagccctctctaaggacaggttggggagggttggggagggctgcctgtgctggactgaggcttgtgccactgggcctttctgattttgcctccaaaggagagcgctgtgatacctacatgtgtaaggaagggccttccgtattggggttctgccaaggacccgtattcagggacccatgctcttttggggggacttttcctcttgtcttccctactttattaggacttgccctgaataccattttctaccccttgcccctccattctcctggcccttctgggggtcagctggtctctatgaatatgctgggggtgcttccccataggtctctcccttcatttgtctctggtgggacaaaatactgactcagtccttagatgtagtttcacccaagagcatcttggccctgggaagaggtccctaggctgcagatgctactgactgcttgctaggtagcctctggaaagcattccccatccatcactccccacttctttctgctgtgctgcttccctcccaaactccatttctgtcaccctttttataagacttttcctcattctgtggggccataaacctatttagtctggagccaaagggatgccctatctgaaggaaaggggcatggggtgggggattccatcaaaactgttgttttttgccccatgatttttctttggtcagtaggaggctggattggagtggtgattattcccctggagctaagctcaggagcccgaagggagagactgagactgactcccttatctcttcatattctttattccctaccagatggatttttttttttttttttggagacggagtctcgccctgtcgccaggctggagtgtagtggcatgatctcgactcactgcaaaatctgcctcccgggttcaagcgattctcctacctcagcctcccgagtagctgggattacaggcatgtgccaccacgccaagctaatttttgtatttttagtagagacggggtttcaccatgttggccaggatggtctcgatctcttgacctcgtgatctgcctgccttggcctcccaaagtgctgggattacaggcgtgagccaccatgccccgccccagatggattttacatttgctcttttgtgtttcgctccaaagggttgtcttcctcgccaaaaggagggagggactttgaatttgatatgaatctttaaaaccagaattggctggatatttcccatgattgggaaaagagtgaaatgaggacattctgtaaactgtccctccctaattccaaggatcagaaactccccgttttgctgactcattccataactggagaaagaagctccattgaccgaagccacagggcagcatggaagtttaaattttctctaaaattaaaatgccaaggataaagctggctgcttccaggagggggaagaggagtggggagtgggcggtgaaacttttccagatgaacggaccataaatgtgttactggctttgtgcctgtagctcattttattatgacctatatgctcctgatttaaagagatctgtgtactgtttacttcccacttcccagaatcccttgtatctcctttctcgggaattgtattttctaataaatgacatttgagaaaaaaatga

SEQ ID NO: 55 - DNA, 4561 bp, Homo sapiens
gttcccgggagcccggggctggccgggcgggagggctggcagcggggcgggcggcggcggcggcctctgggcagtagagggggctccggggctgagtccgcgtcgacgccggccgcggaggcggcaccatgggcaaggggtagaggggcaagttggccaccgccgccgccgggggtggtgggagagccgctccgggggcgggggccggtgggggagggaggggcgggcagccgcgccgccgcggcacttttttaattttttcgggtgccgcagcggcgacccctcggcgccgatgtccctgatccctggagcgacgacggccgctgcctaagctggaaagaggaatgccagctcctgagcaggcctcattggtggaggaggggcaaccacagacccgccaggaagctgcctccactggcccaggcatggaacccgagaccacagccaccactattctagcatccgtgaaggagcaggagcttcagtttcagcgactcacccgagaactggaagtggaaaggcagattgttgccagtcagctagaaagatgtaggcttggagcagaatcaccaagcatcgccagcaccagctcaactgagaagtcatttccttggagatcaacagacgtgccaaatactggtgtaagcaaacctagagtttctgacgctgtccagcccaacaactatctcatcaggacagagccagaacaaggaaccctctattcaccagaacagacatctctccatgaaagtgagggatcattgggtaactcaagaagttcaacacaaatgaattcttattccgacagtggataccaggaagcagggagtttccacaacagccagaacgtgagcaaggcagacaacagacagcagcattcattcataggatcaactaacaaccatgtggtgaggaattcaagagctgaaggacaaacactggttcagccatcagtagccaatcgggccatgagaagagttagttcagttccatctagagcacagtctccttcttatgttatcagcacaggcgtgtctccttcaagggggtctctgagaacttctctgggtagtggatttggctctccgtcagtgaccgacccccgacctctgaaccccagtgcatattcctccaccacattacctgctgcacgggcagcctctccgtactcacagagacccgcctccccaacagctatacggcggattgggtcagtcacctcccggcagacctccaatcccaacggaccaacccctcaataccaaaccaccgccagagtggggtccccactgaccctgacggatgcacagactcgagtagcttccccatcccaaggccaggtggggtcgtcgtcccccaaacgctcagggatgaccgccgtaccacagcatctgggaccttcactgcaaaggactgttcatgacatggagcaattcggacagcagcagtatgacatttatgagaggatggttccacccaggccagacagcctgacaggcttacggagttcctatgctagtcagcatagtcagcttgggcaagaccttcgttctgccgtgtctcccgacttgcacattactcctatatatgaggggaggacctattacagcccagtgtaccgcagcccaaaccatggaactgtggagctccaaggatcgcagacggcgttgtatcgcacaggttcagtaggtattggaaatctacaaaggacatccagccaacgaagtacccttacataccaaagaaataattatgctctgaacacaacagctacctacgcggagccctacaggcctatacaataccgagtgcaagagtgcaattataacaggcttcagcatgcagtgccggctgatgatggcaccacaagatccccatcaatagacagcattcagaaggaccccagggagtttgcctggcgtgatcctgagttgcctgaggtcattcacatgcttcagcaccagttcccatctgttcaggcaaatgcagcggcctacctgcagcacctgtgctttggtgacaacaaagtgaagatggaggtgtgtaggttagggggaatcaagcatctggttgaccttctggaccacagagttttggaagttcagaagaatgcttgtggtgcccttcgaaacctcgtttttggcaagtctacagatgaaaataaaatagcaatgaagaatgttggtgggatacctgccttgttgcgactgttgagaaaatctattgatgcagaagtaagggagcttgttacaggagttctttggaatttatcctcatgtgatgctgtaaaaatgacaatcattcgagatgctctctcaaccttaacaaacactgtgattgttccacattctggatggaataactcttcttttgatgatgatcataaaattaaatttcagacttcactagttctgcgtaacacgacaggttgcctaaggaacctcagctccgcgggggaagaagctcggaagcaaatgcggtcctgcgaggggctggtagactcactgttgtatgtgatccacacgtgtgtgaacacatccgattacgacagcaagacggtggagaactgcgtgtgcaccctgaggaacctgtcctatcggctggagctggaggtgccccaggcccggttactgggactgaacgaattggatgacttactaggaaaagagtctcccagcaaagactctgagccaagttgctgggggaagaagaagaaaaagaaaaagaggactccgcaagaagatcaatgggatggagttggtcctatcccaggactgtcgaagtcccccaaaggggttgagatgctgtggcacccatcggtggtaaaaccatatctgactcttctagcagaaagttccaacccagccaccttggaaggctctgcagggtctctccagaacctctctgctggcaactggaagtttgcagcatatatccgggcggccgtccgaaaagaaaaggggctccccatccttgtggagcttctgagaatggataacgatagagttgtttcttccgtggcaacagccttgaggaatatggcactagatgttcgcaacaaggagctcataggcaaatacgccatgcgagacctggtcaaccggctccccggcggcaatggccccagtgtcttgtctgatgagaccatggcagccatctgctgtgctctgcacgaggtcaccagcaaaaacatggagaacgcaaaagccctggccgactcaggaggcatagagaagctggtgaacataaccaaaggcaggggcgacagatcatctctgaaagtggtgaaggcagcagcccaggtcttgaatacattatggcaatatcgggacctccggagcatttataaaaaggatgggtggaatcagaaccattttattacacctgtgtcgacattggagcgagaccgattcaaatcacatccttccttgtctaccaccaaccaacagatgtcacccatcattcagtcaggctccagcaaaccttcaccaatttacatcagttcctattcctcaccagcaagagaacaaaatagacggctacagcatcaacagctgtattatagtcaagatgactccaacagaaagaactttgatgcatacagattgtatttgcagtctcctcatagctatgaagatccttattttgatgaccgagttcactttccagcttctactgattactcaacacagtatggactgaaatcgaccacaaattatgtagacttttattccactaaacgaccttcttatagagcagaacagtacccagggtccccagactcatgggtgtagcatcaagatgcccaacagaggaactctttctttctaaccttgttcagattgaggtgaaaagtccatcttgctgatttgatgattgaaatgtgaaagtgaagtggaaggaatgaatgaagtgtgttttttttttcttttttgaggaattatcagggaagtgaggaaatgtttgggagaggactttctaagctctatttaggtgttagatctaattacttatagattctgtagtctggtgaaggtgtgggtgacgtgatgagaggtttgagaaatgggtgaaatgaaatgggggatatgtaggtcaaatcaaattaaagatgatttttttaatgtgaataaagttatgttctgatagtttgtacagaaaaaataaaatggatgcccatgttttattgctattactaaatgtcaagattgtatgctattatgtcttgtaaatttcttttgttggtgtaaatatggaaatgccacattggttaagtgccatcatttgtaatgcaatgtgtcacttgaaaagagatttgaagaaactgacaacttcaaaaacaaatgagaagcccaaggaactgtgagcaattaaaagcaaaccgcgacaccctttgtctccaccacacatagtgtactttggaagcacaacgtccaggctggtaccgcagcgccatgcccattcctcgcctcgttcataggacacttcactgccattttctattcacataaaagaaaaataaatgtggaaatttcatccttggaaaaaaaaaaaaaaaaaa

SEQ ID NO: 56 - DNA, 5656 bp, Homo sapiens
acaatgcaccgcacaatggcccgaccgccgccactaccggggcctgagggggcctggcggagcccgagcgcggcccggcccgcagcgtggggccccgagcgcggtgaagagattgttttctgaaagctgcgttggaggctgtgacagagctgagagcctgtgtggagcggatggggaggctttctcaataacatggccctttgccattagccttgccatgaccacatttttcaccagcgtccccccctggattcaagatgcaaagcaggaggaggaagtgggctggaaactagttcccaggcctcggggccgggaggcggagagtcaagtgaagtgccaatgtgaaatttcgggaacacctttctcaaatggggagaagctgaggcctcacagcctcccgcaaccagagcagagaccatatagctgccctcagctgcactgtggcaaggcttttgcttccaaatacaagctgtataggcacatggccacccactcagcccagaaaccccaccagtgtatgtactgtgataagatgtttcaccgcaaggaccatctgcggaaccatctgcagacccatgatcctaacaaagaggccctccactgctctgagtgcggtaagaattacaatacgaagctgggctaccggcgccacctggccatgcatgctgccagcagcggtgacctcagctgcaaggtgtgcctgcagacctttgagagtacccaggccctgctagagcacctgaaggcccactcacgccgggtagcaggcggtgccaaggagaagaagcacccctgtgaccactgcgaccggcggttctatactcgtaaggatgtacggcggcacctagtggtgcacacaggccgtaaggacttcctgtgccagtactgtgcccagcggtttggccgtaaggaccacctgacgcgtcatgtcaagaagagccactcgcaggagctgctcaagatcaagacagagcccgtggacatgttaggcctactcagctgcagctccacagtcagtgtgaaggaagagctgagccctgtgctgtgcatggcctctcgggacgtaatggggaccaaggccttccctggcatgttgcccatgggcatgtatggtgcccacatccctaccatgcccagcacgggcgtgccacactccctggtgcacaacacgctgcccatgggtatgagctaccctctggaatcctcacctatctcttccccagctcagctccctccaaaataccagcttggatctacctcatacttgcccgacaaattgcccaaagtggaggtggatagttttctggcggagcttcctggaagcctgtctctctcatccgctgaaccccagcccgcctcacctcagccggcggcagctgcggccctcctagatgaagcactgcttgccaagagccccgccaacctctctgaggccctctgcgctgctaatgtggacttctcccacctactgggctttcttccactcaacctgcccccgtgtaacccacctggggccacaggaggcctggtcatgggctactcccaggctgaggcacagcccctgcttaccactttgcaagctcagcctcaagattccccaggagctgggggaccactgaactttgggcctctgcactccttgcctcctgtcttcacgtctggcctgagtagcaccaccctgcctcgtttccatcaagcattccagtagcccccacagaggccctcagctcagtttttggctctgttatggagccttagtacccaccccgtctgtgtcccccatgaaggcagctgagctttcagagctgggttcaaaaaaaaaaattccagtgtctgtatacaggagcacttggtttgggggttcaggctctaggatcgattccagaaggagccttgagccccaaccccgtgaaaagatctcataccgtaggacttcaggtattatttacttttatttttttgacctgaatcgggagccacacttggccctcttcctctccaaagcgccagaacctccttctctttggagaatggggaggcctcttggagacacagagggtttcaccttggatgacctctagagaaattgcccaagaagcccaccttctggtcccaacctgcagaccccacagcagtcagttggtcaggccctgctgtagaaggtcacttggctccattgcctgcttccaaccaatgggcaggagagaaggcctttatttctcgcccacccattcctcctgtaccagcacctccgttttcagtcagtgttgtccagcaacggtaccgtttacacagtcacctcagacacaccatttcacctcccttgccaagctgttagccttagagtgattgcagtgaacactgtttacacaccgtgaatccattcccatcagtccattccagttggcaccagcctgaaccatttggtacctggtgttaactggagtcctgtttacaaggtggagtcggggcttgctgacttctcttcatttgaggtcacatttttcccccgtggggaaataaactgactttggactgcttcagtctctgccatcttccatgactgcatttgttcctgcctgcctcggcggtatccacagaagacaggcaagaggattggagcagttttctcacaggtctgcaattctgtttttctccaagtacattatgaccccctcatccttctcttgaactggagaggggaagaaatgaaaggcatgcccacgtccgtcacctccccatcccctagtccccaccttgaacatcatgagctgttgttattagtcttggaagcagagtctgggttggtgtggatagcaaaggaggaagtctgagcccctcattggtcttcctcccacctgtcccttttccgggaagttgtggaattgttggaagaagagtttgcagaaggttaggaatgggtagatagctaagtcctaatctatgggtacattgttgtgtcccaaaccaaaattttccttatccacaatgtcccttctgtctcttccactttacagtggactcggccactgtgcataggcttctctgctctccatcaaatcacttccactttcctgtgcccccacccccgcctccagttttccgctagtatccggcaaggtttcttgcaacaaatgattagttcttttcttctgactcgtggggctccctgctgcagagagcacagcccttgcctggagcccaggaaccccatccttgcttcatctcagttcttcatgggcttcactcttcccactcacggaagggaggtagctcagggacctccactgtgggacccttgagacgcttccactctgattcagaaacacacttctacctctttactgttaactcttaacagatgcagtcagcagtttctgggcacttctctcagtaggtgcctcatgctgacttctccagtagggtttcaggacaaactaccaaggaattgcctcagcctcctaccagtcctccctcacccaccttctgtctaggttcacttggtttgtcatcaggaactgagcaggtccaggactcagctttctgcttcagcctaagccagtactccttgtttgaggtaaaagccttaaaatttagctccctagctcttgattagaagcaatttggagtaagtgtgttttgatttaggcagggtagcttgggatacctttttaaaaacaccagatattaaaatgtctggcaaggttagaatcagactagatgatttgcttctaaaaattagtttcagtgagtcccagggactaattaaggtttattttaaaaagtgtctaccttggtacgcagccacctcctgcatgctgtgcatgttattgggacttgtattataggtgatggtatgtgagaatccagttgggactcgctgttgccatcctctttgttgtatctggttttcatcactagactcagcaacccttctcaccttaactgccaccttccctacactctcagtttacagaggccactgggcctctggctgcagaatacaaagtcccgggctgttagaggagtcctttcctctctgcctgccctttcctgtccctccctcgaattctctctccccgtaagtgatgctggaaaagtcataggactggcaaagcaactgtttaaaccctttgtaaccggggccttgcccccacctcctgtcttttctccttgccttccccactcctgtgtcctcccatctatcctgtctttcctttcctcctctcagtgtcctcagcacccacaaggaattttcctatcactgtgaactttgctggtacagaggaataatatctgccttcacctttttttttttggaccatagctagccagtcatttcttaaacctcccttcctaaaatctggggggtcggggggaaagaaaaaaaaagccttagtggcctggttgttcaaaggataagaatagctttatcctgcactcagtacccgaactcacttcagtatgcttactgaggccatgagaacctgaggggcatctgcccaggacaggagccatggcatatgacaaagaccaatgagggaccaggaaaaaaagtgatgtcccctttccctgccacctccagcctctgccagcaatgagctgtccccctcccaccctacacagtagctggtcagggctgagtacagtcctgggggtaaggggatgacatgcccaggtgtcagctcaaaggatctctgcatcatcttgaggtgggaggcagggaaaggagcgccaatgaggttccctgcaacccccgccctccagcccaccgcccaaccttttacaaatggcattttcttaattgaaaatccgggaagcaggtgtgattacttttttgctcgtagatattgtcctaagttggaattctcccactgccctaaaactttccctagtagtcctttaaactcccccctccctttttggtagctgttttctccgtcctctctccacctgccctcttatctaggagctgtttgtaagcacgatttttttaacaggttatattgtacaggatcaatattttgctttttaacaaggatatttatgtaataagaaactttgccttaggcaggtgttggccagaaaagtccagattcctctgggatcccaccctggcctctcctggaactctgaacctgctgtggaaggaattggccatgaccttcacctctggagagtagggtctatggcgagggaaaagggtgttcaccatgataacctagtgcctccatagaggggtttggaaaaattccagtccgatttctttgtgtgtcagctgacttccttagctgattgttcccacttgcacctctccacctttggcactagaactcctgagacaccacttctcatgcttctccctccctaccagcggtcaaggctttggagccactcttttgtaactccagattatttaaagagaaaagtacaagacagaaatcttctagcactttgtaaacacagtgaataacctcttggagtatttttggctttatataaaacaaggtttttaattgtaaagtataagtgccattagaaaatgcacagggcatatctttgttaaagtagatttttcaatgttttacagaattacattttcaaaaaaaggtttttataatgaagttgtttattaaaaacttctgaatgatgtgtt

SEQ ID NO: 57 - DNA, 9965 bp, Homo sapiens
gcgccgcctccttcggcgttcgccccacggaccggcaggcggcggaccgcggcccaggctgaagctcagggccctgtctgctctgtggactcaacagtttgtggcaagacaagctcagaactgagaagctgtcaccacagtagcttggagctcggcggcacaaccagcaccatctggtcgcgatggtggacacggaaagcccactctgccccctctccccactcgaggccggcgatctagagagcccgttatctgaagagttcctgcaagaaatgggaaacatccaagagatttcgcaatccatcggcgaggatagttctggaagctttggctttacggaataccagtatttaggaagctgtcctggctcagatggctcggtcatcacggacacgctttcaccagcttcgagcccctcctcggtgacttatcctgtggtccccggcagcgtggacgagtctcccagtggagcattgaacatcgaatgtagaatctgcggggacaaggcctcaggctatcattacggagtccacgcgtgtgaaggctgcaagggcttctttcggcgaacgattcgactcaagctggtgtatgacaagtgcgaccgcagctgcaagatccagaaaaagaacagaaacaaatgccagtattgtcgatttcacaagtgcctttctgtcgggatgtcacacaacgcgattcgttttggacgaatgccaagatctgagaaagcaaaactgaaagcagaaattcttacctgtgaacatgacatagaagattctgaaactgcagatctcaaatctctggccaagagaatctacgaggcctacttgaagaacttcaacatgaacaaggtcaaagcccgggtcatcctctcaggaaaggccagtaacaatccaccttttgtcatacatgatatggagacactgtgtatggctgagaagacgctggtggccaagctggtggccaatggcatccagaacaaggaggcggaggtccgcatctttcactgctgccagtgcacgtcagtggagaccgtcacggagctcacggaattcgccaaggccatcccaggcttcgcaaacttggacctgaacgatcaagtgacattgctaaaatacggagtttatgaggccatattcgccatgctgtcttctgtgatgaacaaagacgggatgctggtagcgtatggaaatgggtttataactcgtgaattcctaaaaagcctaaggaaaccgttctgtgatatcatggaacccaagtttgattttgccatgaagttcaatgcactggaactggatgacagtgatatctccctttttgtggctgctatcatttgctgtggagatcgtcctggccttctaaacgtaggacacattgaaaaaatgcaggagggtattgtacatgtgctcagactccacctgcagagcaaccacccggacgatatctttctcttcccaaaacttcttcaaaaaatggcagacctccggcagctggtgacggagcatgcgcagctggtgcagatcatcaagaagacggagtcggatgctgcgctgcacccgctactgcaggagatctacagggacatgtactgagttccttcagatcagccacaccttttccaggagttctgaagctgacagcactacaaaggagacgggggagcagcacgattttgcacaaatatccaccactttaaccttagagcttggacagtctgagctgtaggtaaccggcatattattccatatctttgttttaaccagtacttctaagagcatagaactcaaatgctgggggtaggtggctaatctcaggactgggaagattacggcgaattatgctcaatggtctgattttaactcacccgatgttaatcaatgcacattgctttagatcacattcgtgatttaccatttaattaactggtaacctcaaaattcgtggcctgtcttcccattcaccccgcttttgactattgtgctcctttataattctgaaaactaatcagcactttttaacaatgtttataatcctataagtctagatgtatccaaaggtgaagtatgtaaaaagcagcaaaatatttatttcaaagacttcacttctgtttcctgaatctaaagaaagacaacatgctgctttttaatcataggatggagaattttaaagaactgtttgggccaggcacagtcgctcatacttgtaatcccagcactttgggaggccgaggcgggtggatcacaaggtcagcagatcgagaccatcctggccaacatggtgaaaccctgtctctactaaaaatacaaaaattagccgggtgtggtggcacatgcctgtaatcccagctactcgggaagctgaggcaggagaattgcttgaaccagggagttggaggttgcagtgagctaagactgcaccactgcactccagcctggtgacagaacgagactctgtcttaaaaacaaacaaacaaaaaaaaaatctgttagataagctatcaaaatgcagctgttgttttgtttttggctcactgttttcgtggttgtaactaatatgtggaaaggcccatttccaggtttgcgtagaagagcccagaaaacagagtctcaagacccccgctctggactgtcataagctagcacccgtggtaagcgggacgagacaagctcccgaagcccgccagcttcctgctccactcagctccgtccagtcaacctgaacccacccagtccagctgtctgtgggaatggtggtgttcttagggacagactgacaccttacttgtcagtgttcctccgggccccatttggcagctcccgtatcttttgttatgttgcttttaaagatatgatgttttattgttttaactcttggtgacagtagatgctctctggagcgcagacgaggcacatgtgtcttcatagcctgggctgggtgggagccagtcaccctgcggatcgagagagggggtagagtcttcttcaaatggcagttttacttcaaatggcagatttcacaagagttggttattttttacaatggtttaggttgttaagtctcctttgtatgtaaggtagttttttcaacatctaaaatttttgttttagccttcaaaaccaacttaccaacctcagtccagctgggaaggcagcgttgattatggtagtttgtcaagaatatatggacctggaaacactttctctctctgtccacctggtagataaattgtcctgttgagaatttttagatctggactggaactgccaggaccaccgcctccagggagtcgctgggcacctggaggtatcgtcgatgcctctcccccatctttagaaaatttggctcttctgaggtcattattattttaagaatgattaggattgataagggtcccatgaccagcattatgaaaatgcgagagtgggaaggacacagtgtgagacttccactagaaaaaagtgaaagttagggttaggacatccttttttaaaaattacaaatttagtccgttttggtttttgtaatcaggctaggcacagtggctcacacatggaatcccagcactttgggaggccgaggtgggaggatcacttgagcccaggagttcgagaccagcctaggcaacatagcaagaccctgtctgtacacaaaatttaaaaattagttcatcggggtggcacacatcagtagtcccagctactctgcaggctgaggtgggaggattgcttgaacccaggaggtcgaggctgcagtgagctgtgatctcaccactgcattccagcctgggtgacagagttagattccaccctctcccaccccggcaaaaaaaaaaaaaaaagatgcaatcaaaggggctgttggccagcaatggcagcagcagcggcgggcagtctgcccaagtgtcttaggaaccaaaagcaaataaaagtgtttccatatatgccaccagccaagtggccatcctaattcagaaagaagctagcctttgagtgtctgtcatggtgcatccgtttcagtattatttcctaaaatgagaagcccctgtgtcaacaagatccaggggctggagcccaatgccaagcctgtgttgtccccagcgaccctgcagctgctcgctctgatgtaccctgtgccattcaaggagatgtggtccaggaaagtgagcctcatggttttcagagaagtcattgttctgtttacattttcataaaacctgtttaaaatagctccccgtctcaggctttcagcagtaacagtgagctgactggcaagttcgatgttagctcccgggacactcagcagcgatggtgagcattttggtttccttaaggcccagcaagacttccagggacatctctggtgaagccagaatggagacacccgtgacctcaggctgaaagtcactcgacattggtctcttgtgttgatagggaaggaaatcaggcattcctatttctttaaataacaaaaccactaattgccactcaatgctggaatattttgggtcacctaatcatagatttctcagggcatcaatactcaaatataggctgattatgccccagttcaaatgggaactattaacagagtgcatttcttgcttgctgggtttcaacagacatcagccaaaagaacaaaagagatgtcaggacagattccaggagtgtcggagcacatgtgtggcacccgctccctctggcagcgaatgtaggaagtcgccaaatttacccactcttcaacaagtcattgtttaaacacggtttttcattttctcaacttttaatagcaaaaagtgccaaagtcctcagagacctaacagccttggtctaccgtgctgaccagggtgaaggcacggcgagggactcctcccagacgtgcctcttgtgtgccagctggctgtggctcgggagcagacgcaggcctctccattgtccaggggagcctggcggcgcatccctcctctcccacctcctggcacttccagctgggtgtcccacatgttggattccgtccccaccacacttccagagaccggagaactgtgcagggcctaaggccgtttggatgaattgtcaaaacaagatgcttccagttacagcggcaggagcgggactgggagcacgggctgacggctgctggtgcctttcttcccacctcgcttgcctgtttccgcttgacccttcctccagctccgatgagaagagtataaagcatcttcctaacgggtgtgtttgctatacgaacataatggacgtgaagtggggcagaaacccagaactcagcattcaaggatgcccaggagagctgtccctgttttaaagagctgtgttttgttttgtttcgcatttagagagcagacaaggcacccttctgctgcgctgatacgtttcttacactgggccattttagacccccagggaaacagccttcctggagcgttgtctggaggttccagggacagggcagcctcccagagccgagcaagagctcaaggtacaaatgagagatttgctataccgtgagaagtcaacaacttagccaccacttccccgcaatggaccatgtaacaaatacctcagcaggccctgcaaaaggccatgctagagctgaggcgcacagcctgtggcctctgtagttagggcaggtgggatggagactccttgagtgcacacacctgagcctgcccacacacaggggagcagcatctcgtatgacgtctggaaggaacttcggttgtgtaaagggagccttgaagatacgtgcaaaaggtgctaccccaatttggtgaaactgacattgggcacgtcttgggcttaggagaagcggccgatggtcccggcctgcagtgacaaacccccctccccgcaccgcccccagcaccccctctcctcttcacctcttcctgctggccacgaggaagccacttcctcagagagaccctaccagatgcggatggaaacagatgcaccaaagcaagccctgatgaaaccgcgacttcctaaggtctgtctcctctgaacttgcacctgggcctctctgtgtttggttccaagcacttcccacctcaaactcccattttcaaaccactgtatctctgcgcacatctgctacttaccagccgcatacatgatggagggttttttggtcctgatccagtggccacacctgtctttgaaatgtctcactgaactccagttttaaaatagattcattgcttcaacacagcaagcccaatgcacccagctaagactggcttgaccgacagcctggcctttggtggggggcttcctggggcctggggaaagctggccaccttcaacagctggtacctcttcaacagtgtggcctttcaaaatgcagatgccaccaggagaacatgcccacagctcaccacctatggatgccatggctctgggcagctttcaaagcaggttcctgtggtctcctcagctgtttgagggggtaacagcaaatcagcctccattttaaaatgaaaacaccagcctccagatgtagggcctgctgggtgttgctagccgctggtccccaggcacggtgcactttctccacctcctgcagcctccctgttgtttctagactcttgcacctggtgagtgcaaggataggtgacccaggggcctgcagccttgtcctcagctcccatctcctggactgccagcctcaccctctgcagttagcatggttggcctgatgcagggatcccgagggattactttttagaccttctttcacattcagaaaagtagtatagattcaggagaggcaagaaaattatgctgtccatagaagtcacccatgaagactgatgccaccacctgaaggctcatgattgttaaaaatgtccacgggaacctctcgtccacaggaggtttgtctcaacacttcccatttttacggcattggcattgccaagcatggggaagtatctgctcttctcatgttaaaagtggcccagcttttcttaactcagtccaagctgacttgtttagctgcactggaatttcttaccaaccaaatatttgcatcgagcaaagggggctgtgtgcacctccctaatggcagcgatgatggctgctgtcattcaagcccatcttcagacgtcacagtctggaagtgaaatgtccacaaacatctgtggcagaaaaggctatacggaccacccagttgtgctgcagctttacagagcaaggaagggttgtggcaaataaatgattaacctgcctcgactgtgctgagggcaacaaaggccatctcaccaaaggattattcgatgccattaaatcatcccgtgaccttcctgcttccgagtccatggcctttgcccagggcatgtactcccctgagaggccttctgcctagaaagatctatgactgggttccaaagttgaggcctaggtttttgctgggatttagatattttcaggcaccattttgacagcattcaggaaaacggttattgaccccatagactagggtaagaataaaggcaataaatttggtctgactcagaatataggagatccatatatttctctggaaaccacagtgtacactaaaatgtgaaattgaaggttttgttaaaaagaaaaagataatgagcttcatgctttgtttaattacataatgatttccattacgctatttctgtgaaatgcagcaggttcttaaacgttatttcagtggcatgggctggaagcttatcacaaaaagccatgtgtgtggccttatcagaacagaaagagacaggctggtgcccaaggctgctgcctgctccaccttttgccagctctggacatctgaggacgtcccggcagatctggaatggggccctcaactgaccatttgcttctcagaatttcagtttgagacatgagaggtataatcagttacttttctccccccagagaaacccttttgtgaggggagaggagctatggtatgtggttcagctgaaacacatacaactgcatccttttggagtcctttgccaacaaaaacagaccaacagaccagatggtgtccatgttcaatatcatgtcttgatggacgcagctgatgacctcaaatacttgagtggtctcatggctgttagatggattatttgaaaaaaaaaaaaaaaaaagagagaaaaaataattgatttttacatcagagatagcaaactaagacctggggaggggggtcagcttttattttattttattttttttaagtttgctagttgggtcaaatgtgaggaggagggagtctacctgccacctcttctcttgcccctcttctgcccacacatccagcatccaaaatccattcatttaatgaattgataaagtgccgtgcaaactggtgcacaaacaggcccccagtccacgcagcctggctcctaggaaaagtggtgaccgggcgtgggggggcatgccgcagccctgggacacagtcgggcaccttccccggacccccaggccttggctgtgcctcaagtcagagagggtcagccttcaggccccggagacgagtgactggccgatcatttcacaataaaatcactcacttttggcaacttcactttttttaaggcacagtcagttccttttctcatgtacctcacaaaagatgaagaccatgtagtactctttttggtaaagttacagtgttcatgttaaatatcacttttttctacattgtgtggtaaaaagaactacgttaatagctatatcttaaatactgtgatttgactttttgaaaaatatcctaatacaaatattttactaacttacaatcactcatttaataagaaacatttggattcttttgaaatcagtgttaattgactcatattcttaaaagcctggctcttgaccctattggaaacacaaaggaagctgaaatcaaacatctaaaatacactgcgtacacgtgtgcgtgcacacacacacacacacacacacacacacagctcttcatttctcctgagccatgcagaatttactttcaatgtggaaatctgttccctttaccacactgtatatgcacagagcacaagagaggctatctctagtcacttccaccagcgaggccttagactccgtattagaggccaccgatttcatacaacagtgtttcgctaaagacccttcactattcttgtttagtaaatagctgtctgctcttcagggaactgttacctatgggttattaccaaagaacgctggcaattggaaatgtcctgatggaaattctttgcacgtgccggttctctggcatcctccaggtggcccaacccaaagcagaaagcagaaaccacagaccccgtgagtctccccataccttgtttccaataacttggcaaaacttcttggtgcatattggttacaccctctgggattcataatgccattaggctaaaaccctaagagagagggttgacagaaacacacgcgagaatgaggcagatcccagagcaaggactgggcccagactctccacatgtgctctactagtgagtgccttatactctcagtattttggggcttacagcttcttatttgtgctaaaaaggtgcagttccaaagtaggaactgccacacaggccccagcatcctctctccaacttcatacctctctcctggtggggggagcgggcatccaggacctccggaatcaaggatgtgcagagaagagcgaaagtaatttttctagtcacatgaactgattggttccaggcaattagaaaatggctataaaataaccttaattttaaaaaaaaatcttgggtcttcgttttcctattaggagactgaactgaccacatgtattgatttatatcctgaatatatgggaacttctgtgtttgggatgtcctactgtaagactgatgaatgtacagagttaatttcagggtacagttttgccttaatggttttaaaaaataaactattttttaaaatttt

SEQ ID NO: 58 - DNA, 4884 bp, Homo sapiens
aggtgtcttgggcccgggcggctgtagaggcggcggcgcctacgggcagtgggaggagccgcgcggttccggctgctccggcgaggcgacccttgggtcggcgctgcgggcgaggtgggcaggtaggtgggcggacggccgcggttctccggcaagcgcaggcggcggagtcccccacggcgcccgaagcgcccccccgcacccccggcctccagcgttgaggcgggggagtgaggagatgccgacccagagggacagcagcaccatgtcccacacggtcgcaggcggcggcagcggggaccattcccaccaggtccgggtgaaagcctactaccgcggggatatcatgataacacattttgaaccttccatctcctttgagggcctttgcaatgaggttcgagacatgtgttcttttgacaacgaacagctcttcaccatgaaatggatagatgaggaaggagacccgtgtacagtatcatctcagttggagttagaagaagcctttagactttatgagctaaacaaggattctgaactcttgattcatgtgttcccttgtgtaccagaacgtcctgggatgccttgtccaggagaagataaatccatctaccgtagaggtgcacgccgctggagaaagctttattgtgccaatggccacactttccaagccaagcgtttcaacaggcgtgctcactgtgccatctgcacagaccgaatatggggacttggacgccaaggatataagtgcatcaactgcaaactcttggttcataagaagtgccataaactcgtcacaattgaatgtgggcggcattctttgccacaggaaccagtgatgcccatggatcagtcatccatgcattctgaccatgcacagacagtaattccatataatccttcaagtcatgagagtttggatcaagttggtgaagaaaaagaggcaatgaacaccagggaaagtggcaaagcttcatccagtctaggtcttcaggattttgatttgctccgggtaataggaagaggaagttatgccaaagtactgttggttcgattaaaaaaaacagatcgtatttatgcaatgaaagttgtgaaaaaagagcttgttaatgatgatgaggatattgattgggtacagacagagaagcatgtgtttgagcaggcatccaatcatcctttccttgttgggctgcattcttgctttcagacagaaagcagattgttctttgttatagagtatgtaaatggaggagacctaatgtttcatatgcagcgacaaagaaaacttcctgaagaacatgccagattttactctgcagaaatcagtctagcattaaattatcttcatgagcgagggataatttatagagatttgaaactggacaatgtattactggactctgaaggccacattaaactcactgactacggcatgtgtaaggaaggattacggccaggagatacaaccagcactttctgtggtactcctaattacattgctcctgaaattttaagaggagaagattatggtttcagtgttgactggtgggctcttggagtgctcatgtttgagatgatggcaggaaggtctccatttgatattgttgggagctccgataaccctgaccagaacacagaggattatctcttccaagttattttggaaaaacaaattcgcataccacgttctctgtctgtaaaagctgcaagtgttctgaagagttttcttaataaggaccctaaggaacgattgggttgtcatcctcaaacaggatttgctgatattcagggacacccgttcttccgaaatgttgattgggatatgatggagcaaaaacaggtggtacctccctttaaaccaaatatttctggggaatttggtttggacaactttgattctcagtttactaatgaacctgtccagctcactccagatgacgatgacattgtgaggaagattgatcagtctgaatttgaaggttttgagtatatcaatcctcttttgatgtctgcagaagaatgtgtctgatcctcatttttcaaccatgtattctactcatgttgccatttaatgcatggataaacttgctgcaagcctggatacaattaaccattttatatttgccacctacaaaaaaacacccaatatcttctcttgtagactatatgaatcaattattacatctgttttactatgaaaaaaaaattaatactactagcttccagacaatcatgtcaaaatttagttgaactggtttttcagtttttaaaaggcctacagatgagtaatgaagttatcttttttgtttaaaaaaaaaaaaaacactgcattaaaaaagtatctgttgcattaaggcacatagtgggattacatcataaacctcccataatttttgtcattctgtgttaaatcatttcagggtttaattttgaaataaaagattaatataaaatgcaacaactttttatattacctattagttttggagttctttatgtttaaaaattcaggtgtaaattttattgccttggataaataaattattgatcttttttaaggcagcagttattaaattggtaatagaagatgctgcttgcttagaattgggaaattcggctgggtgcagtgactcaatgcctgtgatcccagtactttgggaggttgaggcgggcagatcacttgaggtcaggagtttgagattggcctggtcaacatggtgaaatcctgtctctactaaaaatacaaaaattagctgggcatggtggcacatacctgtaatcccagctactcgggaggctgaaacaggagaatcgcttgaacccaggagatggagttggcagtgagccaagattagcctgggcaacagtgagtgagactcggtctcaaacaaaaaccaaattgggaaattcttcttgagttaaaaaagacactttttattatgaatcagattccaaatcattaactatttttgcaaaactggcacaagtggtttttctttttaagtatattaacagggtagctcctgagcctttccctttattggaaactttaactgcagtgttaatatatacactgcaaaagaccaaggatgcagttgaatggaaaattactcagtgtatagaaaggaaaaaaaccagaaatttaaaatagatacagaaaagtacactggtaatatttttatttcctattggagagtgaatccccacagttgctttttgtgacttgattcaaatgaggcactcattattgttaccaaacttgtaaaagcattccatgtattcagtggaggcagaatgtataatattttttccttataatttagcatacaggaaaagtatttattttttaagtagggtatcttaattatgctcatttcttcccctaaaccacattatctatatgattggaccctttagtgaaatcagaaaaataaagtaggcatgaataaatgttcaggacacacacatacactcacacacatcacagtatcagctctttcagtgagtttttattaactagataacacatgtaatacatagtagaatacatttcagaggcagagttcctcggattattttttatggatattagtgttcagcagcttattatttaaaggggtgccaaatatagcatccttctgttgtttattttaaatatatttttaatgaaaagggacttaaaaagtaaacatgattatctaaattacttaaaattttttaatcttagtaaaaattttaggaaagttatctagtttaaatttcaaatgttttaaaatttgtaggcatttaataaattatctttttttggaggggtggatgctgcatttcattggaaatgtcatttttccaaagtttctagctatatactctctttccttcaaataacataagtctgaaagcaatgaaaacgtcaaaggaaaatgtttatatacatccacatgtttatttaatatgtttctcttaacacctgaaacttgttttaaaacaaaaagcagtattcacttcaaatcataaacttagaattctgtatctcatgtcagaaatatgtttatggccttgcttttaagtggtgctgtttcccatagggcattagttctcagattttggaatgtgaaataatcacctaggaagttggtttaaaatgcacactagtgagcccaccttagacttcttttggggccttcgacctcactttgagaaataccttcttcaggttattctttatgtttgtcctgtggttaaatattagagtattcatgataaaacattttgagaaggggtaagcagtgagttattacccacaatttaaagcaaattttgaatgaatctttaagttaggtatctaccttcccaccagccccccaaaaaacctctcagtagtttctttcagtgtacaaaatgatgagcatttttctatgatgaggttttaaccattattcagggtggtcttttgtttttaaatctttttttaactaataagatttacggtgtgtattttatacagaaatgcattataaatgtttttaattgtgttctgttttttgcagtctttaagtgccatgccaattgttcttatattctatagaagttcgctcaaaatactcaacaggggaataggcagcggacagtcagaatggttggaattttggctttctaagaaaaactttattttgcataagcatgtggtcagatcattttgtgcatatgcagcctggattggatgttaagtaaatgcttgttcagtgccggtacatttacttaaatctgtttttatttttgtcatgtagaatactactgtggtcatcataatgtaatctatttctgtaccttttttttttttttttactttgaagtctttaaataaaatgtataatacccattgag

SEQ ID NO: 59 - DNA, 4290 bp, Homo sapiens
ccttcctccgccttctgggcggagcccgcgcgggatccgggtggctgcaggctgctggcttctgcggctgcggggtcggggtcgcggccagggccaagccgcagcgagttcacaggcggaacccctgcaggcggcgccccctacgcgaggtcacccctgggaaggagcgcagcccacccggcccctccgcatccgagcaggacgcccgtctcctctccctgaggatttcaggtctccctgtcccaggaggcttgtgccaagatggcatcagctggagacacccaggcaggcccacgggatgcagcagatcagaacttcgactatatgttcaaactgctactgataggcaacagcagtgtgggcaagacttccttcctgttccgatacgcggacgactccttcactcccgccttcgtcagtactgtgggcatcgatttcaaggtcaagaccgtctaccgccatgacaagaggatcaagctgcagatctgggacacagcgggccaggagcgctaccgcaccatcaccacggcctactaccggggagccatgggcttcctgctcatgtatgacatcgccaatcaggaatcctttgccgctgtgcaggactgggccacgcaaatcaagacctactcctgggacaacgcccaggtcatcctggtggggaacaagtgtgacctggaggacgaacgtgttgtgcctgctgaggatggccggaggctcgccgacgaccttggtttcgagttctttgaagccagtgccaaggagaacatcaatgtgaagcaggtcttcgagcgcctggtggatgtcatctgcgagaagatgaacgagtccctggaacccagctccagctcaggcagcaacgggaaaggcccggccgtgggggatgctccagccccccagcccagcagctgcagctgctagagatggcccccaaccccccacccacccctctcctgcctcggcagggactgtgatcgaggcgtgagccacagtggttatctccaagctcagggcaatcccttccctcctgtcaactgctccccgactcctgcatggctcattccttcacaatgtcgccgtggctgccaggttcctcaggcagccccggtgggaggctgcggaccatggggactcagctctgcatggcaggcagaggcccagggacactgacgtgcatgagcttgctgctttccagggtgtgttgagggtggccatgggtgacacgtcccactctttctgatggaggggcatccgtggtgccttctagcttagaaccattttccaggtctcttctgggttgggcaggactgatattcccaagctggtggaagatggttcatcttcctcgcacagtgtgggttcttggagttcatccagggaaggcggcgcctctttctcaggtcctgcaggctggtctctgagcctgcccccacgaactttctggattccaaggtgggatggtgatccctttgacccctgcagaccctctacttgcgaaaagcagcattgaagcagccttttcccattgtagaagggacagggagtcagatcccctcaaccccccggcttcagggaccccagaagtgccttccaagcttcccccaagatccacatcacccacgaccctgccactgtttttgctgtgttcaccacatctctgatcctgaagtgaattctggaactatggaccacattagactgggcagagattcgcccaacccctagcactccggctctgggctttcggccagaagttaattaacctcagagccaggagcctggggctggggcctccctcccaggccctgtttagctgtttagctggttgtgttttaagcaagttcttgcccaatcatgcatcctgctagaaaaggaaatgaagcaacgttcccagccaccgcaggcagttgtcggcgactttctgatgtaagcacctgggctccgacttgaggggggcccttcaagacccaatgtccatttcccaatccttgtcatcggcagggcccagggatgtgacaatttttgctaatggaggagtcacttctttttttttttttttctttttgagatggtctggctctgtcacccaggctggagtgcagtggtgcaatcatagctcaccacagcctcaaactaggggtcacttctaagggatgctgggggttgggcggaaggggtgaggaggtaggattgagtaacttgctgtcactgcttgtactttgtagacagcctgagagtggcaggaccttatgtgaatgggggggatggactgtgatcagtgccggggagtctctgaagctggggtccccacctccaggggcttctgctcagaggttacgtgtgcagtttgaagatgtacatcttgacctccggtttagaggcactttctgcccatcagattccaaactctaggggcgcagcaccttttctttgctcccaaacaccaaccaacaccccttcacaggaccagcactgttaggatggctaagtggatgttttatgttcccacgtccctgactctgtttcagaggttgtgtctgctctcccagcccctgaagccaaaatgacttcctgcagctttcatgagctcagcctcttccctggggtatgtgtgagggggaaagcctggttcaagtttagatttatttctagggagccctggtttcttcataccagaggctacccttagaactttggagtggggtatctttttttcatttgtttttttgatacagagtctcgctctattgcccaggctggagtgcggtggcacaatctcagcttactgcaacctccacctccagggttcaagcgattctcctgcctcagcctcccgagtagctggcattacaggcacctgccaccacacccggctaaattttgtatttttagtagagaaggggtttcaccatgttggtgaggcttgtctcaaactgacttcaagtgatccacttgcttcggcctcccaaagtgctgggattacaggcgtgagccatcacgcccagccgagggtatcttttataccaacaaattagatgactgaggtgtaatggacaaatcctatgcacaaagtgagggtatctgaatatgtgggcgggagtcaaaaatttttagctactttaacactaaagtcaaactaaagtagcttcaaaaagacttctcaagatgcagtatggcctgctgaggtttttttgttttttttttttttaagacagagagtcgctcgtcgcccaggccgcagtgcagtagcatgatctcagctcactgcaacctccacctcccgggttcaagcgattctcctgtctcagcctcctaagtagctgggactacaggcacctgccaccacgcccatctaagttttgcatttttagtagcgacggtttcaccttgttggccaggctggttttgttggccaattgtctctaaactgctgtcaaaaaaaggaatggatcagattgtcttgaatagggcagagctaacctgtaatcacctgtgtgatgagaaacagctttgactgcattttactcctgacctggcctaagctttctgtttacataagatttttcaagaattcaacttcaagtagcagccgagagagctgcctcaggattctctcaaaaactgggaataatatgggaacatttgtttcttctaaaaataaggcaaatgttacattgaatgatttggggggtgaggtttaattggaaatggtctctggggactgaaaactgatgtttttgcagattacctcagggaaacggaggtttgttgagtttacagacacattaaaccaaaggccgtgggaaaacccctctccagctccaggggattggtcaggaccacccactaaccagtgccttccttcttaacattcacttttagcagcttgtgtttattttacatgggcagttttgatgggaaattgccatgaccacaggggtttggagttctgctttttttttttcttcttctttttcgggggactgggggactcctcccaagatcacattttagcatctttctctcctactccatttagaaaaataagtaacaggtgaaatgtggtctcagtgttaacgggataattctgctaccggctcctccctgatgattctgaaatacactactgaacgagctctggctggtcctttctatcctggatgtggttcttctgtgtagcaattccttgatgtccagtttggaaagatgtactcttctcaacaagaaaaacttaaatccgtcgtgcccaaatatagttgtgcttttatttccaaaaaaaaaaaaaaaaaa

SEQ ID NO: 60 - DNA, 4099 bp, Homo sapiens
agccagcccttgccgtggccggagccgagcggcgcatccgggccggagaagaggacgacgacgaggtcctcgaagtggacccgtttgcgaagcgccagggagaaggaggagcggacgcatcgtagaaaggggtggtggcgcccgaccccgcgccccggcccgaagctctgagggcttcccggcccccactgcctgcggcatggcccggggctcggcgctcccgcggcggccgctgctgtgcatcccggccgtctgggcggccgccgcgcttctgctctcagtgtcccggacttcaggtgaagtggaggttctggatccgaacgaccctttaggaccccttgatgggcaggacggcccgattccaactctgaaaggttactttctgaattttctggagccagtaaacaatatcaccattgtccaaggccagacggcaattctgcactgcaaggtggcaggaaacccaccccctaacgtgcggtggctaaagaatgatgccccggtggtgcaggagccgcggcggatcatcatccggaagacagaatatggttcacgactgcgaatccaggacctggacacgacagacactggctactaccagtgcgtggccaccaacgggatgaagaccattaccgccactggcgtcctgtttgtgcggctgggtccaacgcacagcccaaatcataactttcaggatgattaccacgaggatgggttctgccagccttaccggggaattgcctgtgcacgcttcattggcaaccggaccatttatgtggactcgcttcagatgcagggggagattgaaaaccgaatcacagcggccttcaccatgatcggcacgtctacgcacctgtcggaccagtgctcacagttcgccatcccatccttctgccacttcgtgtttcctctgtgcgacgcgcgctcccggacacccaagccgcgtgagctgtgccgcgacgagtgcgaggtgctggagagcgacctgtgccgccaggagtacaccatcgcccgctccaacccgctcatcctcatgcggcttcagctgcccaagtgtgaggcgctgcccatgcctgagagccccgacgctgccaactgcatgcgcattggcatcccagccgagaggctgggccgctaccatcagtgctataacggctcaggcatggattacagaggaacggcaagcaccaccaagtcaggccaccagtgccagccgtgggccctgcagcacccccacagccaccacctgtccagcacagacttccctgagcttggaggggggcacgcctactgccggaaccccggaggccagatggagggcccctggtgctttacgcagaataaaaacgtacgcatggaactgtgtgacgtaccctcgtgtagtccccgagacagcagcaagatggggattctgtacatcttggtccccagcatcgcaattccactggtcatcgcttgccttttcttcttggtttgcatgtgccggaataagcagaaggcatctgcgtccacaccgcagcggcgacagctgatggcctcgcccagccaagacatggaaatgcccctcattaaccagcacaaacaggccaaactcaaagagatcagcctgtctgcggtgaggttcatggaggagctgggagaggaccggtttgggaaagtctacaaaggtcacctgttcggccctgccccgggggagcagacccaggctgtggccatcaaaacgctgaaggacaaagcggaggggcccctgcgggaggagttccggcatgaggctatgctgcgagcacggctgcaacaccccaacgtcgtctgcctgctgggcgtggtgaccaaggaccagcccctgagcatgatcttcagctactgttcgcacggcgacctccacgaattcctggtcatgcgctcgccgcactcggacgtgggcagcaccgatgatgaccgcacggtgaagtccgccctggagccccccgacttcgtgcaccttgtggcacagatcgcggcggggatggagtacctatccagccaccacgtggttcacaaggacctggccacccgcaatgtgctagtgtacgacaagctgaacgtgaagatctcagacttgggcctcttccgagaggtgtatgccgccgattactacaagctgctggggaactcgctgctgcctatccgctggatggccccagaggccatcatgtacggcaagttctccatcgactcagacatctggtcctacggtgtggtcctgtgggaggtcttcagctacggcctgcagccctactgcgggtactccaaccaggatgtggtggagatgatccggaaccggcaggtgctgccttgccccgatgactgtcccgcctgggtgtatgccctcatgatcgagtgctggaacgagttccccagccggcggccccgcttcaaggacatccacagccggctccgagcctggggcaacctttccaactacaacagctcggcgcagacctcgggggccagcaacaccacgcagaccagctccctgagcaccagcccagtgagcaatgtgagcaacgcccgctacgtggggcccaagcagaaggccccgcccttcccacagccccagttcatccccatgaagggccagatcagacccatggtgcccccgccgcagctctacgtccccgtcaacggctaccagccggtgccggcctatggggcctacctgcccaacttctacccggtgcagatcccaatgcagatggccccgcagcaggtgcctcctcagatggtccccaagcccagctcacaccacagtggcagtggctccaccagcacaggctacgtcaccacggccccctccaacacatccatggcagacagggcagccctgctctcagagggcgctgatgacacacagaacgccccagaagatggggcccagagcaccgtgcaggaagcagaggaggaggaggaaggctctgtcccagagactgagctgctgggggactgtgacactctgcaggtggacgaggcccaagtccagctggaagcttgagtggcaccagggcccggggttcggggatagaagccccgccgagaccccacagggacctcagtcacctttgagaagacaccatactcagcaatcacaagagcccgccggccagtgggcttgtttgcagactgggtgaggtggagccctgctcctctctgtcctctgacacagagagctgccctgcctaggagcacccaagccaggcagggggtctggcagcacggcgtcctggggagcaggacacatggtcatccccagggctgtatacattgattctggtggtagactggtagtgagcagcaaatgcctttcaagaaaataggtggcagcttcactccatgtcatatatggagtgaatatttcaaaacgttgggaataagggcctgcaaaaggcagcgaggaggcacctcgggtcttgaggttcctgacaaccgatctggtctgttggtttgaggatgaaggggctccatttctgctgcctccctgctgagaatattctccctttagcagccaaagattcgctggaacggaggctgccctctgctgcctgttggggtcggaagacaaggggcttctgaaatgggagttcctgagatacaacaaaatgtgtgccttcaaagaaactgacagctttgtatttggtgaaatggttttaattatactccatgtgtattttgcccactttttttgggaattcaagggaaagtgtttcttgggtttggaatgttcagaggaagcagtattgtacagaacacggtattgttatttttgttaagaatcatgtacagagcttaaatgtaatttatatgtttttaatatgccattttcattgaagtattttggtcttaagatgactttagtaatttaactgtttatgttacccacgttgggatccagttggtcttggtttgcttctctctgtaccacgtgcacatgaggtccattcattttacagcccctgttacacacagacccacaggcagccgtctgtgccccgcacacattgttggtcctatttgtaaatcccacacccggtgtatccaataaagtgaaacaaagcatgtgaaa

SEQ ID NO: 61 - DNA, 6733 bp, Homo sapiens
cagggatccttccatgaagactgaggcaggcggagctgctaagagcctgctgacatgacatcggccacagagtttgaaaatgtgggcaaccagccaccttacagcaggatcaatgcccgctgggacgccccagacgacgagctggataatgacaacagctcagccaggctctttgagaggtcccggataaaggccttggcagatgagcgggaagttgttcagaaaaagaccttcacgaaatgggtgaactcgcacctggctcgagtgtcctgccgcatcaccgatctctacaaggacctgcgggatgggcgcatgctcatcaagctgctggaggtgctctctggagagatgctgccaaagcccaccaaggggaagatgcgcatccactgcctggagaatgtggacaaggctctccagttcctcaaggagcagcgtgtacacctggagaacatgggctcccacgacattgtagatggcaaccaccgcctggtcctgggcctcatctggaccatcatcctccgcttccagattcaggacattgtggtccaaactcaggaaggtcgtgaaacacgctcagccaaggatgcgttgctgttgtggtgtcagatgaagacggcaggctaccctcatgttaatgtcaccaactttacctccagctggaaggatggcttggcctttaatgccctgatacacaagcaccggcccgacctgatcgactttgataagctgaaggactccaatgcccggcacaacctggagcacgcattcaatgtggctgagcgccagctgggcatcatcccgctcctcgaccccgaagatgtctttacggaaaaccctgatgagaaatccatcatcacctatgtggtggccttttaccactacttctccaagatgaaggtgctggcagtggagggcaagcgtgtcggcaaggttattgaccatgccattgagactgagaagatgattgaaaagtacagcgggctagcctcggacctgctcacctggatcgagcagaccatcactgtcctgaacagccgcaagtttgccaactcgctgacgggcgtccagcagcagctgcaggccttcagcacctaccgcaccgtggagaagccgcccaagtttcaagagaaggggaatctggaagttctactttttaccatccagtcccggatgagagccaacaatcagaaagtgtacacaccccacgatgggaaactagtgtctgacatcaacagggcctgggaaagcctggaggaagctgagtatcggcgggagctggccctgagaaatgagctcattcggcaggagaagctagagcaactggcccggcgctttgaccggaaggccgcaatgagagagacctggctcagtgaaaaccagcgcctcgtggcccaggataactttgggtatgacctggcagctgtggaggccgccaagaagaagcatgaggccatcgagaccgacacggctgcctacgaggagcgggtgagagccctggaggacctggctcaggagctggagaaagagaactaccatgaccagaagcgcatcacggcccgcaaggacaatatactgcgcctatggagctacctgcaggagctgctgcagtcccggcgccagaggctcgagaccaccctggcactgcagaagctcttccaggacatgctgcacagcatcgactggatggatgagatcaaggctcacctcttgtctgccgagtttgggaagcacttgttggaggttgaagacctgctacagaagcacaagttgatggaagctgacatcgccatccaaggggacaaagtgaaggccatcaccgcagccaccctgaagttcaccgaggggaaagggtaccagccttgtgacccccaggtcatccaggaccgcatcagccacttggagcagtgctttgaggagctgagcaacatggcagctgggcggaaggcccaactggagcagtccaaacgactctggaagttcttctgggagatggatgaggctgagagctggatcaaggagaaggagcagatctattcttccctggactatggcaaagacctgaccagtgtgctcatcttacagcgcaagcacaaggcctttgaggatgagctccgtgggctggatgctcacctggagcagatcttccaggaggctcatggcatggttgcgcgcaagcagtttgggcacccgcagatcgaggcccgcataaaggaggtgtcggcacagtgggaccagctgaaggacctggctgccttctgcaagaagaacctccaggatgctgagaactttttccagttccagggcgatgcggatgacctgaaggcttggctgcaagacgcccaccggctgctctctggtgaagatgtggggcaggacgaaggggccacgcgggccctggggaaaaagcacaaggacttcctggaggagctggaggagagccgtggggtgatggagcacctggagcagcaggcccagggattccccgaagagtttcgggattccccagatgtgacccatcggctgcaggccctgcgggagctctaccaacaggtggtggcccaggcggacctgcgtcagcagaggctgcaggaagccctggacctgtacacggtgttcggggagacagacgcctgtgagctgtggatgggagagaaggagaagtggctggccgagatggaaatgccagacaccctggaggacctggaggtcgtgcagcacaggttcgacatcctggaccaggagatgaagaccttgatgactcagattgatggtgtgaacctcgctgccaacagcttggtagagagtggccacccacgcagcagggaggtgaagcagtaccaggaccatctgaacaccaggtggcaggcatttcagaccctggtgtcggagcggcgggaggctgtggactcagccctccgagtgcacaactactgcgtagattgcgaggagaccagcaagtggatcacggacaagacaaaggtagtggagtccacaaaagacctggggcgggacctggcaggtatcatcgccatccagaggaagttgtcagggctggagcgtgacgtggccgccatccaggcccgtgtggatgccctggagcgtgagtcccagcagctgatggactcgcaccctgagcagaaggaggatattggtcagcggcaaaaacacttggaggagctgtggcagggcctgcagcaatccctgcagggccaggaggacttgctgggggaagtcagccagctgcaggccttcctgcaggatctggatgacttccaggcctggctctccatcacccagaaggctgtggcctctgaggacatgcccgaatccctcccagaggctgagcagctcctgcagcagcatgcaggtatcaaggatgagattgacgggcaccaagacagctaccagcgtgttaaggagtctggggagaaagtgatccaaggccagacggacccagagtatctgcttctgggccagcggctggagggcctggatactggctggaatgccctgggcaggatgtgggagagccgcagccacaccctcgctcagtgccttggcttccaggagttccagaaagatgccaagcaggctgaagccatcctcagcaaccaggaatacactctggctcacttggagcccccagactccctggaagctgcagaggctgggatccggaagtttgaggatttcttggggtctatggagaacaaccgggataaggtcttgagtcctgtggactctggaaacaagctggtagctgagggaaacctatactcagacaagatcaaggagaaggtgcagctgattgaggacaggcacaggaagaacaacgagaaggcccaggaggcctctgtcctactgagagacaacctggagctacagaacttcctccagaactgccaggagctcactctctggatcaacgacaagctgctgacatctcaggatgtctcctatgatgaagcacgaaaccttcacaataaatggctaaagcaccaggcgtttgtggcagagctggcttcccatgaagggtggctagagaacatcgatgcggaaggaaagcagctgatggatgagaagccccagtttacagccctggtgtcccaaaagctggaagccctgcaccggctctgggacgagctgcaggccaccacaaaggagaagacccagcacctctcggctgccaggagctccgacctgcgcttgcagacccatgctgacctcaacaagtggatcagcgccatggaggaccagctgcggtcagacgacccgggcaaggacctgaccagtgtcaatcggatgttggctaagctgaagcgagtggaggaccaagtgaatgtgcgaaaagaggagctgggggagctgtttgcccaggtgccttcaatgggagaggagggaggagatgcagacttgagcatcgagaagcggttcctggacctcctggaacccctaggaaggaggaagaagcagctggaatcatccagagccaagctgcagatcagccgggacttagaggatgagacgctttgggtggaggagaggctgcctctggcccagtcagccgactatggcactaatctgcaaactgtgcaactgttcatgaagaagaaccagacactgcagaatgagattctgggccatacgccgcgggttgaggatgtgctgcagagagggcagcagctggtggaggcggcggagatcgactgccaggaccttgaggagcgcctggggcacctgcagagctcctgggacaggctgcgggaggcagcggccgggaggctgcagcgactgagggacgccaacgaggcacagcagtactacctggatgcagacgaggctgaggcctggattggcgagcaggagctctacgtcatctccgatgagatccccaaggatgaagagggcgccattgtgatgctgaagcgacatttgcggcagcagcgtgcggtggaggactacggccggaacatcaagcagctggccagccgggcccagggcctgctgtctgcaggccaccctgagggggaacagatcatcagacttcaggggcaagtggacaagcactacgcagggctgaaggacgtggcggaagagcgcaagcgcaagctggagaacatgtaccacctgttccagctcaagcgggagaccgacgacctggagcagtggatttcagaaaaggagctagtggcctcttccccggaaatggggcaagactttgaccacgtgactcttctgcgggacaagttccgggactttgcccgggagaccggggcgattgggcaggagcgggtggacaatgtgaatgccttcatcgagcgactcatcgacgcgggccacagcgaggcggccaccatcgccgagtggaaggacgggctgaacgagatgtgggcagacctcctggagctcattgacacgcgcatgcagctgctggccgcctcctatgacctgcaccgctacttctacacgggtgccgagatcctgggcctcatcgacgagaagcaccgcgagctgcccgaggacgtggggctggacgccagcacggccgagtccttccaccgggtgcacacagccttcgagcgggagctccacctgctgggtgtccaggtgcagcagttccaggacgtggccacccgtctgcagacagcatatgctggggagaaggcagaggccatccagaacaaggagcaggaggtgtctgccgcgtggcaggcgctgctcgatgcctgtgccgggcgccggacccagctagtggacacggcggataaattccgcttcttcagcatggcccgtgacctcctctcctggatggagagcatcatccggcagatcgagacccaggagaggcccagggatgtctcctctgtggaactgctcatgaagtatcaccagggcatcaatgcagagattgaaacccggagcaagaacttcagtgcctgcctggagcttggcgagtccctgctgcagcggcagcaccaggcctcagaggagatccgcgagaaactgcagcaggtgatgtccaggaggaaagagatgaatgagaagtgggaagcccgctgggagcggctccgcatgttgctggaggtgtgccagttctcgagggatgcctctgtggctgaggcgtggctgattgcccaggagccctacctggccagcggggactttggacacacagtggacagtgtggagaagctcatcaagaggcatgaggcttttgagaagtccacggccagctgggcagagcgctttgctgccctggagaagcccaccacgcttgagctgaaagaacgccagattgcagagagacccgcagaggagactgggcctcaagaggaggaaggcgagacagcaggggaggctccagtttcccaccatgcggccaccgagagaacgtccccggtcagtctctggtctcgtttgtctagttcctgggagtcactgcagccagagccctctcacccctactaggctcagcccaggtggaggcgagatgagctggcgcagccccgccctccatcctccccacatccctgcagccacctcccagcagagcaggctacgtcctcactgaggtgttcttcatgagagtactagcctcctccactcctccccacagcgcagaggaaacaggccagcccagtgacatgacgttattagttttgttttacctaatgtaataaattttattgtataaatatatcaccatttacatgaggggaaacactaaaaaaaa

SEQ ID NO: 62 - DNA, 3098 bp, Homo sapiens
gcacccgcaccggcgcgccggccgtcggtcacgtggcctccggccagggcttgcgaagccggaagtgtcctgagtctcgaggaggccgcgggagcccgccggcggtggcgcggcggagacccggctggtataacaagaggattgcctgatccagccaagatgcagagcacttctaatcatctgtggcttttatctgatattttaggccaaggagctactgcaaatgtctttcgtggaagacataagaaaactggtgatttatttgctatcaaagtatttaataacataagcttccttcgtccagtggatgttcaaatgagagaatttgaagtgttgaaaaaactcaatcacaaaaatattgtcaaattatttgctattgaagaggagacaacaacaagacataaagtacttattatggaattttgtccatgtgggagtttatacactgttttagaagaaccttctaatgcctatggactaccagaatctgaattcttaattgttttgcgagatgtggtgggtggaatgaatcatctacgagagaatggtatagtgcaccgtgatatcaagccaggaaatatcatgcgtgttataggggaagatggacagtctgtgtacaaactcacagattttggtgcagctagagaattagaagatgatgagcagtttgtttctctgtatggcacagaagaatatttgcaccctgatatgtatgagagagcagtgctaagaaaagatcatcagaagaaatatggagcaacagttgatctttggagcattggggtaacattttaccatgcagctactggatcactgccatttagaccctttgaagggcctcgtaggaataaagaagtgatgtataaaataattacaggaaagccttctggtgcaatatctggagtacagaaagcagaaaatggaccaattgactggagtggagacatgcctgtttcttgcagtctttctcggggtcttcaggttctacttacccctgttcttgcaaacatccttgaagcagatcaggaaaagtgttggggttttgaccagttttttgcagaaactagtgatatacttcaccgaatggtaattcatgttttttcgctacaacaaatgacagctcataagatttatattcatagctataatactgctactatatttcatgaactggtatataaacaaaccaaaattatttcttcaaatcaagaacttatctacgaagggcgacgcttagtcttagaacctggaaggctggcacaacatttccctaaaactactgaggaaaaccctatatttgtagtaagccgggaacctctgaataccataggattaatatatgaaaaaatttccctccctaaagtacatccacgttatgatttagacggggatgctagcatggctaaggcaataacaggggttgtgtgttatgcctgcagaattgccagtaccttactgctttatcaggaattaatgcgaaaggggatacgatggctgattgaattaattaaagatgattacaatgaaactgttcacaaaaagacagaagttgtgatcacattggatttctgtatcagaaacattgaaaaaactgtgaaagtatatgaaaagttgatgaagatcaacctggaagcggcagagttaggtgaaatttcagacatacacaccaaattgttgagactttccagttctcagggaacaatagaaaccagtcttcaggatatcgacagcagattatctccaggtggatcactggcagacgcatgggcacatcaagaaggcactcatccgaaagacagaaatgtagaaaaactacaagtcctgttaaattgcatgacagagatttactatcagttcaaaaaagacaaagcagaacgtagattagcttataatgaagaacaaatccacaaatttgataagcaaaaactgtattaccatgccacaaaagctatgacgcactttacagatgaatgtgttaaaaagtatgaggcatttttgaataagtcagaagaatggataagaaagatgcttcatcttaggaaacagttattatcgctgactaatcagtgttttgatattgaagaagaagtatcaaaatatcaagaatatactaatgagttacaagaaactctgcctcagaaaatgtttacagcttccagtggaatcaaacataccatgaccccaatttatccaagttctaacacattagtagaaatgactcttggtatgaagaaattaaaggaagagatggaaggggtggttaaagaacttgctgaaaataaccacattttagaaaggtttggctctttaaccatggatggtggccttcgcaacgttgactgtctttagctttctaatagaagtttaagaaaagtttccgtttgcacaagaaaataacgcttgggcattaaatgaatgcctttatagatagtcacttgtttctacaattcagtatttgatgtggtcgtgtaaatatgtacaatattgtaaatacataaaaaatatacaaatttttggctgctgtgaagatgtaattttatcttttaacatttataattatatgaggaaatttgacctcagtgatcacgagaagaaagccatgaccgaccaatatgttgacatactgatcctctactctgagtggggctaaataagttattttctctgaccgcctactggaaatatttttaagtggaaccaaaataggcatccttacaaatcaggaagactgacttgacacgtttgtaaatggtagaacggtggctactgtgagtggggagcagaaccgcaccactgttatactgggataacaatttttttgagaaggataaagtggcattattttattttacaaggtgcccagatcccagttatccttgtatccatgtaatttcagatgaattattaagcaaacattttaaagtgaattcattattaaaaactattcatttttttcctttggccataaatgtgtaattgtcattaaaattctaaggtcatttcaactgttttaagctgtatatttctttaattctgcttactatttcatggaaaaaaataaatttctcaattttaatgtaaagagttaaaaaaaaaaa

SEQ ID NO: 63 - DNA, 4222 bp, Homo sapiens
ggagaggaggaacggagctgggacgggctgcaggagggaatggccgcaggccggcaggaggaggggcgcgaccacccggccgccggccgatggcggatgaggctatgggggctgagacgcagtagcggccctgcacttctggaggatgctcgaggcccggccccccaggacgcagggcagtgacgctgccggtgccgctgcggggcgggggctgcgggcgctgcttctctccctgaccgcagccgctgggatttggggctccatgggggagagatctgcttaccagcgcctggctgggggcgaggagggaccgcagaggctgggaggcggcagaatgcagccagaggagggcacaggctggctgctggagctgctgtccgaggtgcagctgcaacagtacttcctgcggctccgagatgacctcaacgtcacccgcctgtcccactttgagtacgtcaagaatgaggacctggagaagatcggcatgggtcggcctggccagcggcggctgtgggaggctgtgaagaggaggaaggccttgtgcaaacgcaagtcgtggatgagtaaggtgttcagtggaaagcgactggaggctgagttcccacctcatcactctcagagcaccttccggaagacctcgcccgcccctgggggcccagcaggggaggggcccctgcagagcctcacctgcctcattggggagaaggacctgcgcctcctggagaagctgggtgatggttcctttggcgtggtgcgcaggggcgagtgggacgcgccctcagggaagacggtgagtgtggctgtgaagtgcctgaagcccgatgtcctgagccagccagaagccatggacgacttcatccgggaggtcaatgccatgcactcgctcgaccaccgaaacctcatccgcctctacggggtggtgctcacgccgcccatgaagatggtgacagagctggcacctctgggatcgttgttggaccggctacgtaagcaccagggccacttcctcctggggactctgagccgctacgctgtgcaggtggctgagggcatgggctacctggagtccaagcgctttattcaccgtgacctggctgcccgcaatctgctgttggctacccgcgacctggtcaagatcggggactttgggctgatgcgagcactacctcagaatgacgaccattacgtcatgcaggaacatcgcaaggtgcccttcgcctggtgtgcccccgagagcctgaagacacgcaccttctcccatgccagcgacacctggatgttcggggtgacactgtgggaaatgttcacctacggccaggagccctggatcggcctcaacggcagtcagatcctgcataagatcgacaaggagggggagcggctgccccggcccgaggactgtccccaggacatctacaacgtcatggtccagtgctgggctcacaagccagaggacagacccacgtttgtggccctgcgggacttcctgctggaggcccagcccacagacatgcgggcccttcaggactttgaggaaccggacaagctgcacatccagatgaatgatgtcatcaccgtcatcgagggaagggccgagaactactggtggcgtggccagaacacacggacgctgtgtgtggggcccttccctcgcaacgtggtgacctccgtggccggcctgtcggcccaggacatcagccagcccctgcagaacagcttcatccacacagggcatggcgacagtgacccccgccactgctggggcttcccggacaggattgacgaactgtatctgggaaaccccatggacccccccgacctcctgagcgtggaactgagcacctcccggcccccccagcatctaggaggggtgaaaagggagcctccacctcgcccacctcagcctgccttcttcactcagaaaccaacctatgaccctgtgagcgaggaccaagaccccttgtccagcgacttcaagaggctgggcctgcggaagccaggcctgccccgagggctgtggctggcgaagccctcggcgcgggtgccgggcaccaaggccagccgaggcagcggggctgaggtcacgctcatcgacttcggtgaggagcccgtggtcccggccctacggccctgcgcgccctccctggcgcagctggccatggacgcctgctccctgctggacgagaccccgcctcagagccccacgcgggcactgccccggcccctgcaccccacgcctgtggtggactgggacgcacgcccgctgccccccccgcccgcctatgacgacgtggcccaggatgaggatgactttgagatctgctccatcaacagcaccctcgtgggcgcgggggtccctgccgggcccagccagggccagaccaactacgcctttgtgcctgagcaggcgcggccgccccctcccctggaggacaacctgttcctcccgccccagggtgggggcaagccgcccagctccgcacagaccgcagagatcttccaggcgctacagcaggagtgcatgaggcaactgcaggctccggccggctccccggccccctctcccagcccggggggtgacgacaagccccaggtgcctcctcgggtacccatcccccctcggcccacgcgcccacacgtccagctgtctccagcccccccgggcgaggaggagaccagccagtggcctggacctgcttcccctccccgggtgcctccgcgggagcccctgtcccctcaaggctcgaggacacccagccccctggtaccacctggcagctccccgctgccaccccggctctcaagctcacctgggaagaccatgcccaccacccagagctttgcctcagaccccaagtacgccaccccccaggtgatccaggcccctggcccgcgggctggtccctgcatcctgcccatcgtccgggatggcaagaaggtcagcagcacccactattacttgctgcccgagcgaccatcctacctggagcgctaccagcgcttcctgcgtgaggcccagagccccgaggagcctacccccctgcctgtgcctctgctgctgcccccacccagcaccccagcccccgccgcccccacggccaccgtgcggccgatgccccaggctgccttggaccccaaggccaacttctccaccaacaacagcaacccaggggcccggccaccacccccgagggccactgctcggctgccacagaggggctgccctggcgatgggccagaggcgggccggccagcagacaagatccagatggtggagcagctcttcgggctgggtctgcggcccagaggggagtgccacaaagtgctggagatgttcgactggaacctggagcaggccggctgccaccttctgggctcctggggccctgcccaccacaagcgctgagatgcgtctggagagccagagggcctgcctgaaggaatcacctgagcctgtccgtccaccaggagtggggagatgcccccatccagtcctggaggacccgctgctcctgctgctcccggggatggagcaaggccaaggctgcgggaggctgggagccctgccctgcccatccctcctgcaccagcgctgtccctgcacactttggttcagtcccggtgcccctgccaagatgtggaaggggccgggtgaagacaggcttgagggctgccccagcaggctctgggtatgacctgcctctggccctggtcctgggcggggcctgtgggtggagtagtacccccaggccctgccctgggtgacagactgggaggaaaccaggctggacctgggcaggcgggatgtgttggccacagggagaggcggaccggcacccggtgggacctcctaggactgggccttcttccagggggcccctggcagcagctggggtgtcgggcagaatgtgacttgtggccttaccatggacttgaatgggacttggctggcctcaggatcttgtgcctggaaatagcctgaggtggctcaggaagcggagaaagggtgccagaccattctctggcggggaccagggcccaaggccccagggctggaaggagaccaaggggcagccgccctggagggacatcagtgcttcctcttccacccaattcccccacgcggttccatgttttcccaccagcctgttggcgaagttgctgctccggcattcagtacctgcttcttccagagaaataaagttagtttctattttatgtt

SEQ ID NO: 64 - DNA, 2591 bp, Homo sapiens
gatgggattggggttttcccctcccatgtgctcaagactggcgctaaaagttttgagcttctcaaaagtctagagccaccgtccagggagcaggtagctgctgggctccggggacactttgcgttcgggctgggagcgtgctttccacgacggtgacacgcttccctggattggcagccagactgccttccgggtcactgccatggaggagccgcagtcagatcctagcgtcgagccccctctgagtcaggaaacattttcagacctatggaaactacttcctgaaaacaacgttctgtcccccttgccgtcccaagcaatggatgatttgatgctgtccccggacgatattgaacaatggttcactgaagacccaggtccagatgaagctcccagaatgccagaggctgctccccccgtggcccctgcaccagcagctcctacaccggcggcccctgcaccagccccctcctggcccctgtcatcttctgtcccttcccagaaaacctaccagggcagctacggtttccgtctgggcttcttgcattctgggacagccaagtctgtgacttgcacgtactcccctgccctcaacaagatgttttgccaactggccaagacctgccctgtgcagctgtgggttgattccacacccccgcccggcacccgcgtccgcgccatggccatctacaagcagtcacagcacatgacggaggttgtgaggcgctgcccccaccatgagcgctgctcagatagcgatggtctggcccctcctcagcatcttatccgagtggaaggaaatttgcgtgtggagtatttggatgacagaaacacttttcgacatagtgtggtggtgccctatgagccgcctgaggttggctctgactgtaccaccatccactacaactacatgtgtaacagttcctgcatgggcggcatgaaccggaggcccatcctcaccatcatcacactggaagactccagtggtaatctactgggacggaacagctttgaggtgcgtgtttgtgcctgtcctgggagagaccggcgcacagaggaagagaatctccgcaagaaaggggagcctcaccacgagctgcccccagggagcactaagcgagcactgcccaacaacaccagctcctctccccagccaaagaagaaaccactggatggagaatatttcacccttcagatccgtgggcgtgagcgcttcgagatgttccgagagctgaatgaggccttggaactcaaggatgcccaggctgggaaggagccaggggggagcagggctcactccagccacctgaagtccaaaaagggtcagtctacctcccgccataaaaaactcatgttcaagacagaagggcctgactcagactgacattctccacttcttgttccccactgacagcctcccacccccatctctccctcccctgccattttgggttttgggtctttgaacccttgcttgcaataggtgtgcgtcagaagcacccaggacttccatttgctttgtcccggggctccactgaacaagttggcctgcactggtgttttgttgtggggaggaggatggggagtaggacataccagcttagattttaaggtttttactgtgagggatgtttgggagatgtaagaaatgttcttgcagttaagggttagtttacaatcagccacattctaggtaggggcccacttcaccgtactaaccagggaagctgtccctcactgttgaattttctctaacttcaaggcccatatctgtgaaatgctggcatttgcacctacctcacagagtgcattgtgagggttaatgaaataatgtacatctggccttgaaaccaccttttattacatggggtctagaacttgacccccttgagggtgcttgttccctctccctgttggtcggtgggttggtagtttctacagttgggcagctggttaggtagagggagttgtcaagtctctgctggcccagccaaaccctgtctgacaacctcttggtgaaccttagtacctaaaaggaaatctcaccccatcccacaccctggaggatttcatctcttgtatatgatgatctggatccaccaagacttgttttatgctcagggtcaatttcttttttcttttttttttttttttttctttttctttgagactgggtctcgctttgttgcccaggctggagtggagtggcgtgatcttggcttactgcagcctttgcctccccggctcgagcagtcctgcctcagcctccggagtagctgggaccacaggttcatgccaccatggccagccaacttttgcatgttttgtagagatggggtctcacagtgttgcccaggctggtctcaaactcctgggctcaggcgatccacctgtctcagcctcccagagtgctgggattacaattgtgagccaccacgtccagctggaagggtcaacatcttttacattctgcaagcacatctgcattttcaccccacccttcccctccttctccctttttatatcccatttttatatcgatctcttattttacaataaaactttgctgccacctgtgtgtctgaggggtg

SEQ ID NO: 65 - DNA, 2878 bp, Homo sapiens
ctctcagggcgacagttacaggcaaagaagaggaagtggtagcactagctgtcgctccacaggcgagcagggcaggcgtgcgggcgggtgggtggtggaggctgcgagggtgcacggccggccctgggcaggcggtagccatggagctgtggcgccaatgcacccactggctcatccagtgccgggtgctgccgcccagccaccgcgtgacctgggatggggctcaggtgtgtgaactggcccaggccctccgggatggtgtccttctgtgtcagctgcttaacaacctgctaccccatgccatcaacctgcgtgaggtcaacctgcgcccccagatgtcccagttcctgtgccttaagaacattagaaccttcctgtccacctgctgtgagaagttcggcctcaagcggagcgagctcttcgaagcctttgacctcttcgatgtgcaggattttggcaaggtcatctacaccctgtctgctctgtcctggaccccgatcgcccagaacagggggatcatgcccttccccaccgaggaggagagtgtaggtgatgaagacatctacagtggcctgtccgaccagatcgacgacacggtggaggaggatgaggacctgtatgactgcgtggagaatgaggaggcggaaggcgacgagatctatgaggacctcatgcgctcggagcccgtgtccatgccgcccaagatgacagagtatgacaagcgctgctgctgcctgcgggagatccagcagacggaggagaagtacactgacacgctgggctccatccagcagcatttcttgaagcccctgcaacggttcctgaaacctcaagacattgagatcatctttatcaacattgaggacctgcttcgtgttcatactcacttcctaaaggagatgaaggaagccctgggcacccctggcgcagccaatctctaccaggtcttcatcaaatacaaggagaggttcctcgtctatggccgctactgcagccaggtggagtcagccagcaaacacctggaccgtgtggccgcagcccgggaggacgtgcagatgaagctggaggaatgttctcagagagccaacaacgggaggttcaccctgcgggacctgctgatggtgcctatgcagcgagttctcaaatatcacctccttctccaggagctggtgaaacacacgcaggaggcgatggagaaggagaacctgcggctggccctggatgccatgagggacctggctcagtgcgtgaacgaggtcaagcgagacaacgagacactgcgacagatcaccaatttccagctgtccattgagaacctggaccagtctctggctcactatggccggcccaagatcgacggggaactcaagatcacctcggtggaacggcgctccaagatggacaggtatgccttcctgctcgacaaagctctactcatctgtaagcgcaggggagactcctatgacctcaaggactttgtaaacctgcacagcttccaggttcgggatgactcttcaggagaccgagacaacaagaagtggagccacatgttcctcctgatcgaggaccaaggtgcccagggctatgagctgttcttcaagacaagagaattgaagaagaagtggatggagcagtttgagatggccatctccaacatctatccggagaatgccaccgccaacgggcatgacttccagatgttctcctttgaggagaccacatcctgcaaggcctgtcagatgctgcttagaggtaccttctatcagggctaccgctgccatcggtgccgggcatctgcacacaaggagtgtctggggagggtccctccatgtggccgacatgggcaagatttcccaggaactatgaagaaggacaaactacatcgcagggctcaggacaaaaagaggaatgagctgggtctgcccaagatggaggtgtttcaggaatactacgggcttcctccaccccctggagccattggaccctttctacggctcaaccctggagacattgtggagctcacgaaggctgaggctgaacagaactggtgggagggccctcctcaggacctgtctgttcatctctggtacgcaggccccatggagcgggcaggggcagagagcatcctggccaaccgctcggacgggactttcttggtgcggcagagggtgaaggatgcagcagaatttgccatcagcattaaatataacgtcgaggtcaagcacattaaaatcatgacagcagaaggactgtaccggatcacagagaaaaaggctttccgggggcttacggagctggtggagttttaccagcagaactctctaaaggattgcttcaagtctctggacaccaccttgcagttccccttcaaggagcctgaaaagagaaccatcagcaggccagcagtgggaagcacaaagtattttggcacagccaaagcccgctatgacttctgcgcccgagaccgatcagagctgtcgctcaaggagggtgacatcatcaagatccttaacaagaagggacagcaaggctggtggcgaggggagatctatggccgggttggctggttccctgccaactacgtggaggaagattattctgaatactgctgagccctggtgccttggcagagagacgagaaactccaggctctgagcccggcgtgggcaggcagcggagccaggggctgtgacagctcccggcgggtggagactttgggatggactggaggaggccagcgtccagctggcggtgctcccgggatgtgccctgacatggttaatttataacaccccgatttcctcttgggtcccctcaagcagacggggctcaagggggttacatttaataaaaggatgaagatggatagaaaaaaaaa

SEQ ID NO: 66 - DNA, 4795 bp, Homo sapiens
agagcggagcctgtagccaggcgccatctttgacgctggcagtcttggttttctgctagtgctgctgctgctgggaggacgacggacggcagcggccaagcaagaagaaagacgtggcagcaagcgggagtcggggatagtgtcatcggttcgggtcccggtactttggagcttgtctcaaactccacatacagaaagccaccgaccttattccggtatcctacacccattccccactctcattacactcccacccctggccctcagcgtcggagtcaagagcaacagggacacttccgttctccttgtaggactggtgaaaccgtaatgaagaacacccctaaactcccataatcgatttggggatattccctgcccaaaaaattcctggaaaattgactagtattaagtgcgtaatagattggaactcagtgaagacacagatgttcctgttcagagcaaccagctaatgattacagtttaaagacaatttctgtgatcaagttgtcatttggaagattaaacccatttcacgaggacttggagcctggtccttgctttgaggaagcagtggcttgtttcaagaagccacttctgatctaagaatctacccagcatgcctaatcaaggagaagactgctatttttttttctattccacatgtaccaaaggcgacagctgcccattccgtcactgtgaagctgcaataggaaatgaaactgtttgcacattatggcaagaagggcgctgttttcgacaggtgtgcaggtttcggcacatggagattgataaaaaacgcagtgaaattccttgttattgggaaaatcagccaacaggatgtcaaaaattaaactgcgctttccatcacaatagaggacgatatgttgatggccttttcctacctccgagcaaaactgtgttgcccactgtgcctgagtcaccagaagaggaagtgaaggctagccaactttcagttcagcagaacaaattgtctgtccagtccaatccttcccctcagctgcggagcgttatgaaagtagaaagttccgaaaatgttcctagccccacgcatccaccagttgtaattaatgctgcagatgatgatgaagatgatgatgatcagttttctgaggaaggtgatgaaaccaaaacacctaccctgcaaccaactcctgaagttcacaatggattacgagtgacttctgtccggaaacctgcagtcaatataaagcaaggtgaatgtttgaattttggaataaaaactcttgaggaaattaagtcaaagaaaatgaaggaaaaatctaagaagcaaggtgagggttcttcaggagtttccagtcttttactccaccctgagcccgttccaggtcctgaaaaagaaaatgtcaggactgtggtgaggacagtaactctctccaccaaacaaggagaagaacccttggttagattgagtcttactgagagactggggaaacgaaaattttcagcaggcggtgacagtgatcctccattaaagcgtagcctggcacagaggctagggaagaaagttgaagctccagaaactaacattgacaaaacaccaaagaaagctcaagtttccaagtctcttaaggagcgattaggcatgtcagctgatccagataatgaggatgcaacagataaagttaataaagttggtgagatccatgtgaagacattagaagaaattcttcttgaaagagccagtcagaaacgtggagaattgcaaactaaactcaagacagaaggaccttcaaaaactgatgattctacttcaggagcaagaagctcctccactatccgtatcaaaaccttctctgaggtcctggctgaaaaaaaacatcggcagcaggaagcagagagacaaaaaagcaaaaaggatacaacttgcatcaagctaaagattgatagtgaaattaaaaaaacagtagttttgccacccattgttgccagcagaggacaatcagaggagcctgcaggtaaaacaaagtctatgcaggaggtgcacatcaagacgctggaagaaattaaactggagaaggcactgagggtgcagcagagctctgagagcagcaccagctccccgtctcaacacgaggccactccaggggcaaggcggctgctgcgaatcaccaaaagaacagggatgaaagaagagaagaaccttcaggaaggaaatgaagttgattctcagagcagtattagaacagaagctaaagaggcttcaggtgagaccacaggagttgacatcactaaaattcaagtcaagagatgtgagaccatgagagagaagcacatgcagaaacagcaggagagggaaaaatcagtcttgacacctcttcggggagatgtagcctcttgcaatacccaagtggcagagaaaccagtgctcactgctgtgccaggaatcacacggcacctgaccaagcggcttcccacaaagtcatcccagaaggtggaggtagaaacctcagggattggagactcattattgaatgtgaaatgtgcagcacagaccttggaaaaaaggggtaaagctaaacccaaagtgaacgtgaagccatctgtggttaaagttgtgtcatcccccaaattggccccaaaacgtaaggcagtggagatgcacgctgctgtcattgccgctgtgaagccactcagctccagcagtgtcctacaggaacccccagccaaaaaggcagctgtggctgttgtcccgcttgtctctgaggacaaatcagtcactgtgcctgaagcagaaaatcctagagacagtcttgtgctgcctccaacccagtcctcttcagattcctcacccccggaggtgtctggcccttcctcatcccaaatgagcatgaaaactcgccgactcagctctgcctcaacaggaaagcccccactctctgtggaggatgattttgagaaactaatatgggagatttcaggaggcaaattggaagctgagattgacctggatcctgggaaagatgaagatgaccttctgcttgagctatcagaaatgattgatagctgaaggtggtagtgaggacactttaaaaaaaaaatcgccaaaaaactggacttagtttcatctattgtaacatttacctgagatgatcatttctttagtctagaatttgccccaaatcagaagtatacctctgaattatctgtatgtgtcctggattccttggggtcagatttttaaagttactttataaccattttgtccatttgatgccattgtttatcatcttttgagaaaaaagttctgtcatacccttctctccacaaaaaagagactgagagggagatcaagtgaaagggtgcaagcgaacttagtgactccttgaggtgtttgtcagttttggcttttttcttctttgttgtattctttatgtattgtcttgatgtacttaatattacctgagtttgaaatggatgaagacagctgctaccattaaggaccaaattttatgctaccactaaacaaaaatacccactcagtctgtgttaaattgtatgtctttttaaaggtatttaaagattcaactaagctttaaagagggctgagcagctcaggaagcctgtaatgtgggcataactctttggacctgatcttgatgcttctgctgctctgttagcctctgaagagcaatatctaatttattattactgtaattttttaaaaggctttaaagtgcctcaggggtcccctgaaactaattttctatttctgggattccctggattcattatatgagatggtgacatgattagaggaattcttttttagtatgaaaattgtcccttttcttcttcagtacttgcctccttgctggcattgaattaacacagggacaaaatttggttaattttttatttctaactctcccaacaaacccctgttgcccagtatttgtttggtggcctttaaccacctgagggaaaaaatgagcttattcaagctgccaatatttatctatgggctgtagcagtacactgaattgtactgtgccagggatattgagatgctctgggggtgtattgtatacctgccagttttcttcatttctgaattgagttttcttttcttgatgttggtttccttcatatcacctcaaggtttagatttgtgaaggaataagcatgatggaaataatagtcttgaaaggagatatgttgtatataatcaggaggaagaggaaggaaggacttacccattttgatattttgctgtaggtggccagttttgtttctcatagggaaatctgacccacctgtcatgttggctcctaaggaactgctgttgtaagcggctcatcaagagttgaacttcacgtagccttgttgggaatatggaaaaggaagaaagccacaggactgcccattcagtcttgggaagattgggatgattctgcacaagcaaaaatgactgaagtttatgtatagacacacctctaccaatccatcttcagctgactgaatgttgtatgatagcccttctccaaagcagaggtagaatgttcaggtttcaccatggattttctacttatttcgtttttggaatcagcttacagattccaggtcccttttgtatatattctttattcttttgcttttttaaaaaataattttgtttcatatttaaagcacttgtattagtcaatgtttcgtgttccgcattatttgaaccatttgcccttacagaaagagaaatacttgtttgtgttttaaataaaactgatgtaggaaagtcttgaaaaaaaaaaaaaaaaaa

SEQ ID NO: 67 - DNA, 1976 bp, Homo sapiens
gcaggtttagcgccactctgctggctgaggctgcggagagtgtgcggctccaggtgggctcacgcggtcgtgatgtctcgggagtcggatgttgaggctcagcagtctcatggcagcagtgcctgttcacagccccatggcagcgttacccagtcccaaggctcctcctcacagtcccagggcatatccagctcctctaccagcacgatgccaaactccagccagtcctctcactccagctctgggacactgagctccttagagacagtgtccactcaggaactctattctattcctgaggaccaagaacctgaggaccaagaacctgaggagcctacccctgccccctgggctcgattatgggcccttcaggatggatttgccaatcttgaatgtgtgaatgacaactactggtttgggagggacaaaagctgtgaatattgctttgatgaaccactgctgaaaagaacagataaataccgaacatacagcaagaaacactttcggattttcagggaagtgggtcctaaaaactcttacattgcatacatagaagatcacagtggcaatggaacctttgtaaatacagagcttgtagggaaaggaaaacgccgtcctttgaataacaattctgaaattgcactgtcactaagcagaaataaagagaaaatacttaaaatctactctctcagctgattttcaaaaatacggcggggcgcggtggctcacgtctttaatcccagcactttgggaggccgaggctggcagatcacctgagtttttgtcttttttgatctgactgtagatgatcagtcagtttatcctaaggcattaagagatgaatacatcatgtcaaaaactcttggaagtggtgcctgtggagaggtaaagctggctttcgagaggaaaacatgtaagaaagtagccataaagatcatcagcaaaaggaagtttgctattggttcagcaagagaggcagacccagctctcaatgttgaaacagaaatagaaattttgaaaaagctaaatcatccttgcatcatcaagattaaaaacttttttgatgcagaagattattatattgttttggaattgatggaagggggagagctgtttgacaaagtggtggggaataaacgcctgaaagaagctacctgcaagctctatttttaccagatgctcttggctgtgcagtaccttcatgaaaacggtattatacaccgtgacttaaagccagagaatgttttactgtcatctcaagaagaggactgtcttataaagattactgattttgggcactccaagattttgggagagacctctctcatgagaaccttatgtggaacccccacctacttggcgcctgaagttcttgtttctgttgggactgctgggtataaccgtgctgtggactgctggagtttaggagttattctttttatctgccttagtgggtatccacctttctctgagcataggactcaagtgtcactgaaggatcagatcaccagtggaaaatacaacttcattcctgaagtctgggcagaagtctcagagaaagctctggaccttgtcaagaagttgttggtagtggatccaaaggcacgttttacgacagaagaagccttaagacacccgtggcttcaggatgaagacatgaagagaaagtttcaagatcttctgtctgaggaaaatgaatccacagctctaccccaggttctagcccagccttctactagtcgaaagcggccccgtgaaggggaagccgagggtgccgagaccacaaagcgcccagctgtgtgtgctgctgtgttgtgaactccgtggtttgaacacgaaagaaatgtaccttctttcactctgtcatctttcttttctttgagtctgtttttttatagtttgtattttaattatgggaataattgctttttcacagtcactgatgtacaattaaaaacctgatggaacctggaaaa

SEQ ID NO: 68 - DNA, 1862 bp, Homo sapiens
gcaggtttagcgccactctgctggctgaggctgcggagagtgtgcggctccaggtgggctcacgcggtcgtgatgtctcgggagtcggatgttgaggctcagcagtctcatggcagcagtgcctgttcacagccccatggcagcgttacccagtcccaaggctcctcctcacagtcccagggcatatccagctcctctaccagcacgatgccaaactccagccagtcctctcactccagctctgggacactgagctccttagagacagtgtccactcaggaactctattctattcctgaggaccaagaacctgaggaccaagaacctgaggagcctacccctgccccctgggctcgattatgggcccttcaggatggatttgccaatcttgaatgtgtgaatgacaactactggtttgggagggacaaaagctgtgaatattgctttgatgaaccactgctgaaaagaacagataaataccgaacatacagcaagaaacactttcggattttcagggaagtgggtcctaaaaactcttacattgcatacatagaagatcacagtggcaatggaacctttgtaaatacagagcttgtagggaaaggaaaacgccgtcctttgaataacaattctgaaattgcactgtcactaagcagaaataaagtttttgtcttttttgatctgactgtagatgatcagtcagtttatcctaaggcattaagagatgaatacatcatgtcaaaaactcttggaagtggtgcctgtggagaggtaaagctggctttcgagaggaaaacatgtaagaaagtagccataaagatcatcagcaaaaggaagtttgctattggttcagcaagagaggcagacccagctctcaatgttgaaacagaaatagaaattttgaaaaagctaaatcatccttgcatcatcaagattaaaaacttttttgatgcagaagattattatattgttttggaattgatggaagggggagagctgtttgacaaagtggtggggaataaacgcctgaaagaagctacctgcaagctctatttttaccagatgctcttggctgtgcagtaccttcatgaaaacggtattatacaccgtgacttaaagccagagaatgttttactgtcatctcaagaagaggactgtcttataaagattactgattttgggcactccaagattttgggagagacctctctcatgagaaccttatgtggaacccccacctacttggcgcctgaagttcttgtttctgttgggactgctgggtataaccgtgctgtggactgctggagtttaggagttattctttttatctgccttagtgggtatccacctttctctgagcataggactcaagtgtcactgaaggatcagatcaccagtggaaaatacaacttcattcctgaagtctgggcagaagtctcagagaaagctctggaccttgtcaagaagttgttggtagtggatccaaaggcacgttttacgacagaagaagccttaagacacccgtggcttcaggatgaagacatgaagagaaagtttcaagatcttctgtctgaggaaaatgaatccacagctctaccccaggttctagcccagccttctactagtcgaaagcggccccgtgaaggggaagccgagggtgccgagaccacaaagcgcccagctgtgtgtgctgctgtgttgtgaactccgtggtttgaacacgaaagaaatgtaccttctttcactctgtcatctttcttttctttgagtctgtttttttatagtttgtattttaattatgggaataattgctttttcacagtcactgatgtacaattaaaaacctgatggaacctggaaaa

SEQ ID NO: 69 - DNA, 1775 bp, Homo sapiens
gcaggtttagcgccactctgctggctgaggctgcggagagtgtgcggctccaggtgggctcacgcggtcgtgatgtctcgggagtcggatgttgaggctcagcagtctcatggcagcagtgcctgttcacagccccatggcagcgttacccagtcccaaggctcctcctcacagtcccagggcatatccagctcctctaccagcacgatgccaaactccagccagtcctctcactccagctctgggacactgagctccttagagacagtgtccactcaggaactctattctattcctgaggaccaagaacctgaggaccaagaacctgaggagcctacccctgccccctgggctcgattatgggcccttcaggatggatttgccaatcttgaatgtgtgaatgacaactactggtttgggagggacaaaagctgtgaatattgctttgatgaaccactgctgaaaagaacagataaataccgaacatacagcaagaaacactttcggattttcagggaagtgggtcctaaaaactcttacattgcatacatagaagatcacagtggcaatggaacctttgtaaatacagagcttgtagggaaaggaaaacgccgtcctttgaataacaattctgaaattgcactgtcactaagcagaaataaagtttttgtcttttttgatctgactgtagatgatcagtcagtttatcctaaggcattaagagatgaatacatcatgtcaaaaactcttggaagtggtgcctgtggagaggtaaagctggctttcgagaggaaaacatgtaagaaagtagccataaagatcatcagcaaaaggaagtttgctattggttcagcaagagaggcagacccagctctcaatgttgaaacagaaatagaaattttgaaaaagctaaatcatccttgcatcatcaagattaaaaacttttttgatgcagaagattattatattgttttggaattgatggaagggggagagctgtttgacaaagtggtggggaataaacgcctgaaagaagctacctgcaagctctatttttaccagatgctcttggctgtgcagattactgattttgggcactccaagattttgggagagacctctctcatgagaaccttatgtggaacccccacctacttggcgcctgaagttcttgtttctgttgggactgctgggtataaccgtgctgtggactgctggagtttaggagttattctttttatctgccttagtgggtatccacctttctctgagcataggactcaagtgtcactgaaggatcagatcaccagtggaaaatacaacttcattcctgaagtctgggcagaagtctcagagaaagctctggaccttgtcaagaagttgttggtagtggatccaaaggcacgttttacgacagaagaagccttaagacacccgtggcttcaggatgaagacatgaagagaaagtttcaagatcttctgtctgaggaaaatgaatccacagctctaccccaggttctagcccagccttctactagtcgaaagcggccccgtgaaggggaagccgagggtgccgagaccacaaagcgcccagctgtgtgtgctgctgtgttgtgaactccgtggtttgaacacgaaagaaatgtaccttctttcactctgtcatctttcttttctttgagtctgtttttttatagtttgtattttaattatgggaataattgctttttcacagtcactgatgtacaattaaaaacctgatggaacctggaaaa

SEQ ID NO: 70 - DNA, 5817 bp, Homo sapiens
gcggagaaggaggcggagggagcgattgtggccccggccgcggtggccggcgcggcctgccctttgtgaccgcagctcgcgccccacgccccgcgcccatggccgccgtgccgggctccctggccacgcgtgcccgcccgcggacctgagccccgcgcctgggatgccggggatgcgcgtcccccggccctgcggctgctccgggctgggcgcggggcgatggacctgagcatgaagaagttcgccgtgcgcaggttcttctctgtgtacctgcgcaggaagtcgcgctccaagagctccagcctgagccggctcgaggaagaaggcgtcgtgaaggagatagacatcagccatcatgtgaaggagggctttgagaaggcagatccttcccagtttgagctgctgaaggttttaggacaaggatcctatggaaaggtgttcctggtgaggaaggtgaaggggtccgacgctgggcagctctacgccatgaaggtccttaagaaagccaccctaaaagttcgggaccgagtgagatcgaagatggagagagacatcttggcagaagtgaatcaccccttcattgtgaagcttcattatgcctttcagacggaaggaaagctctacctgatcctggacttcctgcggggaggggacctcttcacccggctctccaaagaggtcatgttcacggaggaggatgtcaagttctacctggctgagctggccttggctttagaccatctccacagcctggggatcatctacagagatctgaagcctgagaacatcctcctggatgaagaggggcacattaagatcacagatttcggcctgagtaaggaggccattgaccacgacaagagagcgtactccttctgcgggacgatcgagtacatggcgcccgaggtggtgaaccggcgaggacacacgcagagtgccgactggtggtccttcggcgtgctcatgtttgagatgctcacggggtccctgccgttccaggggaaggacaggaaggagaccatggctctcatcctcaaagccaagctggggatgccgcagttcctcagtggggaggcacagagtttgctgcgagctctcttcaaacggaacccctgcaaccggctgggtgctggcattgacggagtggaggaaattaagcgccatcccttctttgtgaccatagactggaacacgctgtaccggaaggagatcaagccaccgttcaaaccagcagtgggcaggcctgaggacaccttccactttgaccccgagttcacagcgcggacgcccacagactctcctggcgtccccccgagtgcaaacgctcatcacctgtttagaggattcagctttgtggcctcaagcctgatccaggagccctcacagcaagatctgcacaaagtcccagttcacccaatcgtgcagcagttacacgggaacaacatccacttcaccgatggctacgagatcaaggaggacatcggggtgggctcctactcagtgtgcaagcgatgtgtgcataaagccacagacaccgagtatgccgtgaagatcattgataagagcaagagagacccctcggaagagattgagatcctcctgcggtacggccagcacccgaacatcatcaccctcaaggatgtctatgatgatggcaagtttgtgtacctggtaatggagctgatgcgtggtggggagctcctggaccgcatcctccggcagagatacttctcggagcgcgaagccagtgacgtcctgtgcaccatcaccaagaccatggactacctccattcccagggggttgttcatcgagacctgaagccgagtaacatcctgtacagggatgagtcggggagcccagaatccatccgagtctgcgacttcggctttgccaagcagctgcgcgcggggaacgggctgctcatgacaccctgctacacggccaatttcgtggccccggaggtcctgaagcgtcaaggctatgatgcggcgtgtgacatctggagtttggggatcctgttgtacaccatgctggcaggatttaccccttttgcaaatgggccagacgatacccctgaggagattctggcgcggatcggcagtgggaagtatgccctttctgggggaaactgggactcgatatctgacgcagctaaagacgtcgtgtccaagatgctccacgtggaccctcatcagcgcctgacggcgatgcaagtgctcaaacacccgtgggtggtcaacagagagtacctgtccccaaaccagctcagccgacaggacgtgcacctggtgaagggcgcgatggccgccacctactttgctctaaacagaacacctcaggccccgcggctggagcccgtgctgtcatccaacctggctcagcgcagaggcatgaagagactcacgtccacgcggctgtagcgggtgggaccctggccccagcgtcccctgccagcatcctcgtgggctcacagaccccggcctcggagcccgtctggcacccagagtgaccacaagtccagcagggaggcggcgcccgccctcgccgtgtccgtgttttctttttcagccccggagagggtcctgacctgggggcttctccaagcctcactgcgccagcctccccgcccgctctcttttctcccaagcgaaaccaaatgcgccccttcacctcgcgtgcccgtgcgaggccgggggcttctttcagagcccgcgggtcctctcatacatggcttctgtttctgccgagagatctgttttccaattatgaagccggtcggtttggtcagactcccgacacccacgtcccaggtacccggtgggaaagtggcagtgcgagggcgcagccattggtggttgcagggccccagagggctggggtgacctggcatcccggggctccccacgggctggatgacggggttggcactgtggcgtccaggaggagatgcctggttctgcccaaaataatccaaagagccgtttcctcctcgcccttcagtttttgcctgaggtgctgggtagcccatcctttcctctgtcccagattcaaatgaggagtaagagcccagacgagaggaaggcaggctggatctttgccttgagagctccgtgtcaccaggatggaagggggtgcctctcggaggagcctgtgtccacctccagtctcggctttccccggggggccaagcgcactgggctgccgtctgtccccagctcccgtggccacacagctatctggaggctttgcagggagtcgtgggttctcgcacctgctcagccctgtgtcggcttcctgtgtgctcacctaaagctgtggttttgctgtgttcacttcgatttttctggtctgtggagaaactgtgaattggagaaatggagctctgtggcttcccacccaaaccttctcagtccagctggaggctggagggagacacaggccccacccagcagactgaggggcagaggcacaggtgggagggcagcggagatcagcgtggacaggagcgatgcactttgtagatgctgtggctttgtgttgcgttttgtgtctctgttgcacagatctgttttttcacactgatccgtattcccctgggtgtgcacacagggcgggtgtggggcatttaggccatgctgtgctctacttcattgagtaaaatcgagtgagaggttccgggcagcaggatcgacgcccagtccagccggcagagggaacacacgggtccttcattgtcctgtaagggtgttgaagatgctccctggcggcccccaagcagactagatgggaggaggcgccgctcagcccctcaccctgcatcactgaagagcggcgcctctgcagcaagcagggcttcaggaggtgcccgctggccacagccaggttttccctaagaagatgttattttgttgggttttgttccccctccatctcgattctcgtacccaactaaaaaaaaaaaaataaagaaaaaatgtgctgcgttctgaaaaataactccttagcttggtctgattgttttcagaccttaaaatataaacttgtttcacaagctttaatccatgtggattttttttttcttagagaaccacaaaacataaaaggagcaagtcggactgaatacctgtttccatagtgcccacagggtattcctcacattttctccatagaagatgctttttcccaaggctagaacgacttccaccatgatgaatttgctttttaggtcttaattatttcacttctttttagaaacttaggaagaagtggataatcctgaggtcacacaatctgtcctcccagaaatgaacaaaagtcatcaccttttctgcttgctacacaggcaacgattcccccatcagctgcccggaccctttggcctggcttggtgtgcaggcctgtctgtttgcttaaagtcagtgggttctggtgcagggagtgagaagtgggggaagtgaaagggaaagcatccgtgagaaagcggccacggttttccctccttgtgtgcccatggggcaccagctcatggtctttttcagtcatcccagtttgtacagacttagcttctgaactctaagaatgccaaagggaccgacgagactccccatcacagcgagctctgtccttacatgtatttgatgtgcatcagcggaggagaacactggcttggccctgctccgctgagtgtctgtgaaatacctctactttccctcccatatccagaacaaaatgatacttgacatccttccacaaaagtcagcctaaagaagttatggtatcatatgttaaactaagctttcaaaaaccttagtgaaatagcaagtgactgctttcaagcagcagtcgacatgtaaatgaaggtgttcttagaattcgcattttgccagctcagcgcacctccacaacgaatgaaatgctccgtatgatttgcacaaatgacatagacctccccaaaagttaactggctctccttcctcacacagttcatcataacccaaccccccacccccgggtcatgaaaatcacagaacttataaacacattgaaccctagatctcaggcttcctgacctaccgccagtggccccttgctggccaccctatagggtcctccttccctggcagccccccatgtgggagaaatacctgattctcccaatctgcagtgggagagctttgctgaattccatcccaaagtcaaacatgggcaagaggtgaggatttcacttttaccctcaagtccgatttgtctgtgattttaaactaactgtgtatgtattgatgtttggaagattgtttgaattttaaagtgataatagtacttaatgttatccagtattgttcattaaatggtgttatcctaaagctgcacttgggatttttacctaacgctttactgattctctcaagcacatggcaaagtttgatttgcactccgttcatttctgacacgttttgctgcctcctacctttctaagcgtcatgcaaattcgagaatggagaaggacgctgccggtccctgagcggtgtggagagggcggaaggtggactccagcgcagcttgaggggctgaggacggaggctgcagcatctgtgtcgttctactgagcacgcttctctgcctcgctcctgactcagcactttgttcactggctcagcagttatgtttacacatcatttttatgttcctgctttgtaattcatgtttgagatgggtggccactgtacagatatttattacgctttccagactttctgaatagatttttttgaataaacatggttttatgaagtgtaatctttttctagcctaacaat

SEQ ID NO: 71 - DNA, 7336 bp, Homo sapiens
cccagccccatttaacttcgcggcggcggcggcgactgcggcgccgcgggctggaggccggcgtcggggaaggtcctggtgccggattccgcacgaggtgttgacgggcggcttctgccaacttctccccagcgcgcgccgagcccgcgcggccccggggctgcacgtcccagatacttctgcggcgcaaggctacaactgagacccggaggagactagaccccatggcttcctggacgagcccctggtgggtgctgatagggatggtcttcatgcactctcccctcccgcagaccacagctgagaaatctcctggagcctatttccttcccgagtttgcactttctcctcagggaagttttctggaagacacaacaggggagcagttcctcacttatcgctatgatgaccagacctcaagaaacactcgttcagatgaagacaaagatggcaactgggatgcttggggcgactggagtgactgctcccggacctgtgggggaggagcatcatattctctgcggagatgtttgactggaaggaattgtgaagggcagaacattcggtacaagacatgcagcaatcatgactgccctccagatgcagaagatttcagagcccagcagtgctcagcctacaatgatgtccagtatcaggggcattactatgaatggcttccacgatataatgatcctgctgccccgtgtgcactcaagtgtcatgcacaaggacaaaacttggtggtggagctggcacctaaggtactggatggaactcgttgcaacacggactccttggacatgtgtatcagtggcatctgtcaggcagtgggctgcgatcggcaactgggaagcaatgccaaggaggacaactgtggagtctgtgccggcgatggctccacctgcaggcttgtacggggacaatcaaagtcacacgtttctcctgaaaaaagagaagaaaatgtaattgctgttcctttgggaagtcgaagtgtgagaattacagtgaaaggacctgcccacctctttattgaatcaaaaacacttcaaggaagcaaaggagaacacagctttaacagccccggcgtctttctcgtagaaaacacaacagtggaatttcagaggggctccgagaggcaaacttttaagattccaggacctctgatggctgatttcatcttcaagaccaggtacactgcagccaaagacagcgtggttcagttcttcttttaccagcccatcagtcatcagtggagacaaactgacttctttccctgcactgtgacgtgtggaggaggttatcagctcaattctgctgaatgtgtggatatccgcttgaagagggtagttcctgaccattattgtcactactaccctgaaaatgtaaaaccaaaaccaaaactgaaggaatgcagcatggatccctgcccatcaagtgatggatttaaagagataatgccctatgaccacttccaacctcttcctcgctgggaacataatccttggactgcatgttccgtgtcctgtggaggagggattcagagacggagctttgtgtgtgtagaggaatccatgcatggagagatattgcaggtggaagaatggaagtgcatgtacgcacccaaacccaaggttatgcaaacttgtaatctgtttgattgccccaagtggattgccatggagtggtctcagtgcacagtgacttgtggccgagggttacggtaccgggttgttctgtgtattaaccaccgcggagagcatgttgggggctgcaatccacaactgaagttacacatcaaagaagaatgtgtcattcccatcccgtgttataaaccaaaagaaaaaagtccagtggaagcaaaattgccttggctgaaacaagcacaagaactagaagagaccagaatagcaacagaagaaccaacgttcattccagaaccctggtcagcctgcagtaccacgtgtgggccgggtgtgcaggtccgtgaggtgaagtgccgtgtgctcctcacattcacgcagactgagactgagctgcccgaggaagagtgtgaaggccccaagctgcccaccgaacggccctgcctcctggaagcatgtgatgagagcccggcctcccgagagctagacatccctctccctgaggacagtgagacgacttacgactgggagtacgctgggttcaccccttgcacagcaacatgcgtgggaggccatcaagaagccatagcagtgtgcttacatatccagacccagcagacagtcaatgacagcttgtgtgatatggtccaccgtcctccagccatgagccaggcctgtaacacagagccctgtccccccaggtggcatgtgggctcttgggggccctgctcagctacctgtggagttggaattcagacccgagatgtgtactgcctgcacccaggggagacccctgcccctcctgaggagtgccgagatgaaaagccccatgctttacaagcatgcaatcagtttgactgccctcctggctggcacattgaagaatggcagcagtgttccaggacttgtggcgggggaactcagaacagaagagtcacctgtcggcagctgctaacggatggcagctttttgaatctctcagatgaattgtgccaaggacccaaggcatcgtctcacaagtcctgtgccaggacagactgtcctccacatttagctgtgggagactggtcgaagtgttctgtcagttgtggtgttggaatccagagaagaaagcaggtgtgtcaaaggctggcagccaaaggtcggcgcatccccctcagtgagatgatgtgcagggatctaccagggctccctcttgtaagatcttgccagatgcctgagtgcagtaaaatcaaatcagagatgaagacaaaacttggtgagcagggtccgcagatcctcagtgtccagagagtctacattcagacaagggaagagaagcgtattaacctgaccattggtagcagagcctatttgctgcccaacacatccgtgattattaagtgccccgtgcgacgattccagaaatctctgatccagtgggagaaggatggccgttgcctgcagaactccaaacggcttggcatcaccaagtcaggctcactaaaaatccatggtcttgctgcccccgacatcggcgtgtaccggtgcattgcaggctctgcacaggaaacagttgtgctcaagctcattggtactgacaaccggctcatcgcacgcccagccctcagggagcctatgagggaatatcctgggatggaccacagcgaagccaatagtttgggagtcacatggcacaaaatgaggcaaatgtggaataacaaaaatgacctttatctggatgatgaccacattagtaaccagcctttcttgagagctctgttaggccactgcagcaattctgcaggaagcaccaactcctgggagttgaagaataagcagtttgaagcagcagttaaacaaggagcatatagcatggatacagcccagtttgatgagctgataagaaacatgagtcagctcatggaaaccggagaggtcagcgatgatcttgcgtcccagctgatatatcagctggtggccgaattagccaaggcacagccaacacacatgcagtggcggggcatccaggaagagacacctcctgctgctcagctcagaggggaaacagggagtgtgtcccaaagctcgcatgcaaaaaactcaggcaagctgacattcaagccgaaaggacctgttctcatgaggcaaagccaacctccctcaatttcatttaataaaacaataaattccaggattggaaatacagtatacattacaaaaaggacagaggtcatcaatatactgtgtgaccttattacccccagtgaggccacatatacatggaccaaggatggaaccttgttacagccctcagtaaaaataattttggatggaactgggaagatacagatacagaatcctacaaggaaagaacaaggcatatatgaatgttctgtagctaatcatcttggttcagatgtggaaagttcttctgtgctgtatgcagaggcacctgtcatcttgtctgttgaaagaaatatcaccaaaccagagcacaaccatctgtctgttgtggttggaggcatcgtggaggcagcccttggagcaaacgtgacaatccgatgtcctgtaaaaggtgtccctcagcctaatataacttggttgaagagaggaggatctctgagtggcaatgtttccttgcttttcaatggatccctgttgttgcagaatgtttcccttgaaaatgaaggaacctacgtctgcatagccaccaatgctcttggaaaggcagtggcaacatctgtactccacttgctggaacgaagatggccagagagtagaatcgtatttctgcaaggacataaaaagtacattctccaggcaaccaacactagaaccaacagcaatgacccaacaggagaacccccgcctcaagagcctttttgggagcctggtaactggtcacattgttctgccacctgtggtcatttgggagcccgcattcagagaccccagtgtgtgatggccaatgggcaggaagtgagtgaggccctgtgtgatcacctccagaagccactggctgggtttgagccctgtaacatccgggactgcccagcgaggtggttcacaagtgtgtggtcacagtgctctgtgtcttgcggtgaaggataccacagtcggcaggtgacgtgcaagcggacaaaagccaatggaactgtgcaggtggtgtctccaagagcatgtgcccctaaagaccggcctctgggaagaaaaccatgttttggtcatccatgtgttcagtgggaaccagggaaccggtgtcctggacgttgcatgggccgtgctgtgaggatgcagcagcgtcacacagcttgtcaacacaacagctctgactccaactgtgatgacagaaagagacccaccttaagaaggaactgcacatcaggggcctgtgatgtgtgttggcacacaggcccttggaagccctgtacagcagcctgtggcaggggtttccagtctcggaaagtcgactgtatccacacaaggagttgcaaacctgtggccaagagacactgtgtacagaaaaagaaaccaatttcctggcggcactgtcttgggccctcctgtgatagagactgcacagacacaactcactactgtatgtttgtaaaacatcttaatttgtgttctctagaccgctacaaacaaaggtgctgccagtcatgtcaagagggataaacctttggaggggtcatgatgctgctgtgaagataaaagtagaatataaaagctcttttccccatgtcgctgattcaaaaacatgtatttcttaaaagactagattctatggatcaaacagaggttgatgcaaaaacaccactgttaaggtgtaaagtgaaattttccaatggtagttttatattccaattttttaaaatgatgtattcaaggatgaacaaaatactatagcatgcatgccactgcacttgggacctcatcatgtcagttgaatcgagaaatcaccaagattatgagtgcatcctcacgtgctgcctctttcctgtgatatgtagactagcacagagtggtacatcctaaaaacttgggaaacacagcaacccatgacttcctcttctctcaagttgcaggttttcaacagttttataaggtatttgcattttagaagctctggccagtagttgttaagatgttggcattaatggcattttcatagatccttggtttagtctgtgaaaaagaaaccatctctctggataggctgtcacactgactgacctaagggttcatggaagcatggcatcttgtccttgcttttagaacacccatggaagaaaacacagagtagatattgctgtcatttatacaactacagaaatttatctatgacctaatgaggcatctcggaagtcaaagaagagggaaagttaaccttttctactgatttcgtagtatattcagagctttcttttaagagctgtgaatgaaactttttctaagcactattctattgcacacaaacagaaaaccaaagccttattagacctaatttatgcataaagtagtattcctgagaactttattttggaaaatttataagaaagtaatccaaataagaaacacgatagttgaaaataatttttatagtaaataattgttttgggctgatttttcagtaaatccaaagtgacttaggttagaagttacactaaggaccaggggttggaatcagaatttagtttaagatttgaggaaaagggtaagggttagtttcagttttaggattagagctagaattgggttaggtgagaaagaaagttaaggttaaggctagagttgtctttaagggttagggttaggaccaggttaggtcagggttggattgggtttagattggggccagtgctggtgttagtgatagtgtcaggatggaggttaggtttggagtaagcgttgttgctgaagtgagttcaggctagcattaaattgtaagttctgaagctgatttggttatggggtctttcccctgtatactaccagttgtgtctttagatggcacacaagtccaaataagtggtcatacttctttattcagggtctcagctgcctgtacacctgctgcctacatcttcttggcaacaaagttacctgccacaggctctgctgagcctagttcctggtcagtaataactgaacagtgcattttggctttggatgtgtctgtggacaagcttgctgagtttctctaccatattctgagcacacggtctcttttgttctaacttcagcttcactgacactgggttgagcactactgtatgtggagggtttggtgattgggaatggatgggggacagtgaggaggacacaccagcccattagttgttaatcatcaatcacatctgattgttgaaggttattaaattaaaagaaagatcatttgtaacatactctttgtatatatttattatatgaaaggtgcaatattttattttgtacagtatgtaataaagacatgggacatatatttttcttattaacaaaatttcatattaaattgcttcactttgtatttaaagttaaaagttactatttttcatttgctattgtactttcattgttgtcattcaattgacattcctgtgtactgtattttactactgtttttataacatgagagttaatgtttctgtttcatgatccttatgtaattcagaaataaatttactttgattattcagtggcatccttataaa

SEQ ID NO: 72 - DNA, 13109 bp, Homo sapiens
gggttcctcgcggcgatcccgactctcctcccgcggctgcagcagctgccggttgcacacggcctcggcggcggcgcggcgagcgcgggcctgtggagcggcggccgggcgcgcggccccggcgggcacccctcagagggcggccgaggaagctccgggaggaggagcaggaccacgaggaggtgggaggcggcggccgcctggggaccagctccgcgcctcggcctctccgccccctccccagcctttctctcgccctcttctcccacactcccggccggcgcctcggctttgtgcgaggagatggtgtagccccctggccgccgaaggaggagccggacacttgtctcccgtctccgagctgctccccacccctggaggagagacccccccctcggctcggcgccttctgcgtctcccggctggtggggaagcctctgcgccgccggcaccatgagtgaacagagtatctgtcaggcaagagctgctgtgatggtttatgatgatgccaataagaagtgggtgccagctggtggctcaactggattcagcagagttcatatctatcaccatacaggcaacaacacattcagagtggtgggcaggaagattcaggaccatcaggtcgtgataaactgtgccattcctaaagggttgaagtacaatcaagctacacagaccttccaccagtggcgagatgctagacaggtgtatggtctcaactttggcagcaaagaggatgccaatgtcttcgcaagtgccatgatgcatgccttagaagtgttaaattcacaggaaacagggccaacattgcctagacaaaactcacaactacctgctcaagttcaaaatggcccatcccaagaagaattggaaattcaaagaagacaactacaagaacagcaacggcaaaaggagctggagcgggaaaggctggagcgagaaagaatggaaagagaaaggttggagagagagaggttagaaagggaaaggctggagagggagcgactggaacaagaacagctggagagagagagacaagaacgggaacggcaggaacgcctggagcggcaggaacgcctggagcggcaggaacgcctggagcggcaggaacgcctggatcgggagaggcaagaaagacaagaacgagagaggctggagagactggaacgggagaggcaagaaagggagcgacaagagcagttagaaagggaacagctggaatgggagagagagcgcagaatatcaagtgctgctgcccctgcctctgttgagactcctctaaactctgtgctgggagactcttctgcttctgagccaggcttgcaggcagcctctcagccggccgagactccatcccaacagggcattgtcttgggaccacttgcacctccacctcctccaccactcccaccagggcctgcacaggcttcagtagccctccctcctcccccagggccccctccacctcctccactcccatccaccgggcctccaccgccccctcctccccctcctctccctaatcaagtaccccctcctcctccaccacctcctgccccacccctccctgcatctggattctttttggcatccatgtcagaagacaatcgccctttaactggacttgcagctgcaattgccggagcaaaacttaggaaagtgtcacggatggaggatacctctttcccaagtggagggaatgctattggtgtgaactccgcctcatctaaaacagatacaggccgtggaaatggaccccttcctttagggggtagtggtttaatggaagaaatgagtgccctgctggccaggaggagaagaattgctgaaaagggatcaacaatagaaacagaacaaaaagaggacaaaggtgaagattcagagcctgtaacttctaaggcctcttcaacaagtacacctgaaccaacaagaaaaccttgggaaagaacaaatacaatgaatggcagcaagtcacctgttatctccagaccaaaatccacacccttatcacagcccagtgccaatggagtccagacggaaggacttgactatgacaggctgaagcaggacattttagatgaaatgagaaaagaattaacaaagctaaaagaagagctcattgatgcaatcaggcaggaactgagcaagtcaaatactgcatagaggaacagactaaggagagataggactttaatctggaggaaaaatatcctacaaacaacaactgttcacaacagcaaacccctacatttatgagctgtaagaagaaaatggagacaaacagaaggagggaaaaaccaacctactctgaaagccttcagacattatgactctggtgataagctctttccctctccgtttgctgcttttttctggcctttacaacagaatggaagagaatcatttaagagttcctgtaacagttatgcagaaaatactaaaacccatcaggcaagatcaccacgcattgaaatattttcatatcaagataaagtcgcacattttccacaatacattgctaaaataaagaggagaaaggcttaggaagtttttttgcagagagtgctggtaaagaattgagcaagtttgctattgtattgtaatgtttctctcaggtttgttcttcctatcatgtttgatattccatgaataattgagatcagccctatgtaagttaagatcataatatgtggaacaaatggaattgtaagtgctttcaaagggtaatatttataagaaagtgtccgaaaaatgtttcttcagcttgagaaattttagaatgataggaagtttctcgagttagccttcatgcaattttgtagattaaaacataaaatttgtccagaacttaaagatttagatgccttcctaaattgttacaatgctttaccaaatctatgacttctacataacacaaaccagtggtcaaatgtaaacactatattgtagatttactgtaggttttcaaccttttttagatttatgcatgtggacatttttataatgtaattacaatcaccacaaggttagcttttttaattgcagacagtaatgcatgtcacactaatatgtagtggccttttcaaggcctagtcccagggaaaacattttgtagagtataggggagtgggaggaaggggaggaataattttttatttaaagttgatttctgcactatctttttctcagttacctgcatgaataaataatgagaaatattttgtgactttaattggtaaatatgttacaaaaccaagtacttaatcttttacatcatgtcttcagctatttgtattttaaccagtaatttcaatggtctgaaacatgattctgagcttcacataatatcttaactgtggaactcaaaagtttgatcactgaatttggcagttattattacctaggtacccccgctgttacacaggtgtttagatacgtgttcctgaatgaagctgcttttgaattttgttatgttgaaatgcaagaaataacaatgatggcagcaattaaggtcacagaaatcattaggtaaaggaaaaccaatgaggagttctgcagttttcttttaataagtaaagtgagacttgggtggtgggaagaaggaaggtgggaagaaggaattagacactctgcctgccactctgcgtgtgtgtgctctcgcgcacgtgctgtctatatggaagccactcccttttctttcctttgaaactggtaaggttaaaataggggagaaatcctacatgttggaatgatagctttttggaaaatttaagaaactctccaggctctccatcttgatttatgcttgagttgttatgtgccatatttgctttgaactctgattatcagaagttttactaaaactttgaaataattcactttcatctgctttctagattttgtacatctcagtccataaagcaaagcttgttgatagtgtagttttctaaacgctgcaaatttgcagcctttaccactacaaagaagtttggatgagggattttttttttctttgtcaaaatagttcctgtttctgtagaaatttcatttttagattaaactgtgatggatgagctatcataattcaagtatacatttcttttttctatcagatattcattgtcatgcagtagtagtaaaaacatcaaagatgcagcaagcttattaagtattattttctaaaagaaataggaggcattttcatctttattattgtacttttggttatgcaaacactttgataatataaacagttatgtcccctataaatctggtcagcaacctcttttgattttgttgggtaagttaaatagtctgtagtaggtagagtactgggtacaagtggtccaaactaagataagagactaaaataaaatgctaaatcttaaaagaaactgggtttatgcactaaacgttttgtgccttggtctaatattaacatgatgtatgtgtaaactgacaaaaaaaaaaaaaaaaaaaaaccagtgttgaatcatgctatatttcccatcatcccagattgctaaatgttctttccaagaagtctgaatgaattattatatacatttgctatcatacatgacagttgtgtcattattagagatttcagtaattaaaatgggaaacagaagcctaagttatttaccttatcaaaaccacgttccttggaaccacattattatgatggtttttgtgctcttgtacgttggatgtcttaagctgagtacagtttaggggatcctttctaatgacaggaaggcactgctttcctcaacactgtgatctgacctgtgacaagtctgtactatccactatgtaaatggctcacaagtcaattgcaaacaaactgaatgtacaaatcttagtgctggtgctgaaatctcttcagaatagtcatcatgatttaaaagtttgtttaaaaatttgcaagcatcaagtgtcaatcaaaactgaagatgaaacactaatgaatgttgaattctcatgcttttaggtgtacttcctttttagaattttcagttttctgctatttttaccgtaactatttcgtttaaatttgtttcatttaagtttcctacacgctaacttcgtttgtgcgattgaaataaaattgcagtatatatatgttgcttgtttgtgacacttagataatcttctgaaataatttgttttaaagtaagttatattggatgtgaaaaacaccttttaaagtccaagactttactacttaaaagtttacatgtcacgtcactattctttacagatttcatagaagtcgtgaatactaagtaatgtatacaaaagaaatatgtgatgatgtgtctactttttgtttgaaataactgttgggtgttccctcttcttattttctctctgcccaccttgacacagtaacttcctcttatagtcaagatgatgattaagtgtttaatttttattccattttgttctgcaacacgttcaggtacttaaaactcattcatgcagttagaattatcctttatgtagtttgcatggtaaaggacattgtgtggtaaagggcattattgagtaatgaattttaagtatagcaaaatatgtatagtgtttatacatgatgctgatttcttaaaacctacatataagcagtagtactttttctctattataaagtattaattttgagttccattttataattctgatgtcttcattagaaatacaaaaatacaatccttgtattttttctttgaccagacccaaattttccccttcccccctccattctcctctccacttctcgtggaccgcgtgttcccaatattcattaacatttgcagccattacagagttacagttgtaaaattttcagctgtttttttttttttttttttgctctagcctgtctcatgttcttgcttctcttcatatgtaagtcagtatttttgtctacaaattaaaagtcacttgtcattcaaaaatgagttaagtaacatgataatcttttaaatttacctagctacaacttttatgtctcttgtaaatttatatatactttcagtgccattgtgaagaattggccttttaattctaagtagtattaccctatgaagcacagtgtgcaaaggtatgctacaaggtctctttaattcctgtgtggccattataattttataacaccattaccctttaaattctaccgattataagcagcgtaaaagtaactatataaagcaaacatcgcaaaggaactctgcaggagctcttaattcctttatgtagctatcataaaattcactttcctgaagacatttactctcattcacttccaaactccaaacctttttctggtagcaccacttttgtttttaatagaaagatgagttcatatctgtacatctctccaaagctctaaggaatgagaaaaggatcctagtatattgaaattactgatgtttaatacctctgccttttcactaaaagccatttaatatttttaaagtcaaaacttgacatacaggtatttataaggaatctccatgactctgaaggaatgaaattgatgtaggtagctttggctatgtaaagacatagtagaggacaattacttaaagaagagttttcttttgaggatttgtagatttgactaagcagctgaagtcagtaacccctcaagaaagtccgtttatagaagccaagaactgttggaggtctgtgatgcaggtttttctgttcccaacatcaaaagctgtggattatttggtgtgttcccctttatgttatctctcgataatttttgagacatcaagattttttaaaatatcaatactggaaagatgaaaccttcaaattaaaacctaaaattgattagaaagaaaagtaaaatattaatgcagtaaatttaggatggttacagatactcaccatcaacataaataaatggagttctaggataaattatttgtggaatactaatggtcaagtcacataagagtaaaatcttttggtgaggagacacatttgacaactgctaaagaattaactaaatttgtctttctaaatagttttctttataaagtaacagaaacattgtaaaaggataaatgactgtcataatgacttaggatgttgtaagaatgtctgccacatttattggttatttctgttgaaatctgaaggaatcgatacatctgaaaattgagaaagggaaataggactgtccccgttacagatactctgtgatgcacacaaccttctaaacggaagtgttagtatcatttaaagcacatagtaggccttgagtatttgcagattaacatgcagaaaaaatcaaagatgaagccccaattaagtgtttgaaccaaagaatcacagtcactgagctgcacccccgttctgtgaagcatgttaaatactcataaagagcagagagcagggcccgtagacgcttctggtgtaggacacaggaattctaggcagagggagaaaattaggggccccagttggtggctgagagtaaaaagaatataccatttgagtagtgctgttctttttcctcagtttttaaagacatataattcctagtagttaggacatctaaatagctcggtaaactggtcagaggcgggaggattgcttgaggccagaagttttgagatcagcctgggtaacagggagactcatttctacaaaaaaatttaaaaatttaggccaggcatggtggtgcacacctgtaatcccagctactcaggagactgaagcgggaggatcacctgagcccagggaggacgcggctgcagtgagccgttatcatgccactgtactccagcctgggtgacagagcgagaacctgtctctaaaaaaaaaaaaaaaaaattctaagagaatatagcttttcatagaaattattagaaaagcttacatatttcattagagagcccagtttgttagactacatttattccgtaaaagttctatatacaaatgacaacccatagtttatcatgtaaatctgatttaactgttcccttcaattccaagaaagatttcttcagcagtagatgacaattctaaaagcataaagaaataactaataaaggagatggatgatgttataggttggtttggttgggttttagtaaatagttattcttctaagaaggcttagaaaatcgagaattgaatagttggtactttgaattccataggaaaaagcactcagaagaaaaagtctacattggctagtgtttagattgagagttaattttcccatcaagtccaaaagtttccatccaagtctatagaaactgagagaaaaggttcttggcttacacttaaaatacacattgttgcaaccatataagagagatacattacagaacgcttttaaaaatttggtctcttaagcgcctaacagtccatgctttagtcacatctgtgaaacctcttttctttttttctttttcttttatttttttttttaaagattaaaggcattttaaaaataaatgtttcatggccgggcatggtggctcacgcctgtaatcccagcactttgggaggctgaggtgggcagatcacctgaggtcaggagtttgagaccagcctggccaacatgatgaaaccccatctctactaaaaatacaaaaaaattggctgggcatagtggtgggcacctgtaatcccagctcttcgggaggctgagacagaagagtcgcttgaatccaggaggtggaggttgcagtgagctaagaccgcgccactgtactccagcctgggcgacagagcgagattccatctctaaataaataaatgtttttcaacgtgttttatgtgagaaataccagcttttcattattactaccagttgatctcaggtgtcacttggttggttctgctgaccgaggcactgggcattttaaatatggagtttccctccacccattgatcaagtctgaggtttgtccatccttggtggcaggctagcttaaccatggattcacaaaccccatttgattgtcgtaagtcataaggccaccccagtgccagtggttgggcatcacagtgagtctgaggtgatgaatttgagttagctgtaggctagttccgcaactcagcaatagcccatggatggttggtaaaagacgttgactttgccacttaaatttccaggagaagaatagcttatagtttatctgaggaaagtaattgggaaggcttagatattgagaagaaagccctgttaaaatctaggtagcatttcctttcttctttattactagagggatgggaggttcaggcctgagtcaggactttacaatttggtgtccttcccagaggtactttgggcttgatcattttaagtttcaattgcaaaaaaaaatttttgacggagtgttgctctgtcactcaggttggagtgcagtggtgcgatctcggctcactgcaacttcccccccctgggttcaaagggattttcctgcctcagcctcccaagtagctgggactacaggcgcgtgccaccatgcccgactaatttttgtatttttagtagagatggggtttcaccatgttgcccaggctggtcttgaactcctgagctcaggtgatctgcccgcctcggccttcaattgcagaagtttttgaagggagaatatttgatcctcacataaaatgtccttgtttctgaaagaaaacatggtaaaaattgttattgagtccatgtctttgccaccttgttggacttgatttccctttctctgtgttcctcccgccctcagtctctctcagtctgtccttttttgtgtgtggagttgtgggcaggtcattggactgggactgactttaccagttttcaggctgtggggctagtcagtcattctctctgagccttctacctctaaagttgagttctttttttaaattctttttgttttgtttttattttttccttgccactatacaagcaaggatagataaagctttttattattattgttattattattatttcgagacagtctcgctctgtcatccaggctggagtgcagtggtgtgatttcagctcactgcaacctctgcctcccgggttcaagcgattctcctacctcagcctccttagtagctgggactacaggcatgcgccaccacacccggctaatttttgtatttttagtagagacagggtttcaccgtattggccaggctggtctcgaactcctgacctcaggtgatccacccaccttggcctcccaaagtgttgggattacaggcataagcgaccgtgcccatccccgataaagttgagttctgaatttcctctttcactgtattctcggcagctactggttggtttattctttttttttaatcttttttggtttattcttcttttgatctttgaagagaaggagaaaaaagatctgagtttggctctcccatcttaagtgcagcttttagttgttttatagtcatagacgctattgcactggacagcatgcatcctggatgtaaacaatgcggaaaaatcaatggagtgaccatcttggggtcagtggtgttgcataaagcaccagtggtgtgctgttctgtgtcagtttcctctgcgccacgtgctttcacagtttgaattaccagcatctctgtggtggcttcagtacattctccattgtgcttcaacctggaagcacattctgccgttcagaaagactgattccaatcatgtaatgggaccacacgagatccatgctccaattatatgaatagcagaaggtccatttgactcttgtagttcaagagctgtttctaagtaaacagactttccagagctcgatgaagtgaagaagcccttctttcaattcctgggcagaattcagtggttttcatatcatctgaacctgctgtgctgctgtttattctatcactgtcagccttgaaaggaaaaaaggaataatcttaccctcctgcccttcttattttatatcttccatcttatccatctatatccatgtagtcattccttccgagttccctggttttaatccaaaagactctgtttaacagcaatgtcttggcagaccaggtgccgcttccgtgccatttgagggctctgagtctttgcttcgtcttaggaagataaagataatttggcagaaagtcagagatggaaatagcagtttgggatgataaaagatgggtcctgttttgctgacattcttttactttggttcttggtgcgtgtcctttgggattcatttcttgctagcatgaataggacatgcttttcgttaggtgcttttcttttttggagaacatgaagtgtttctaacaaaactgaatgagctagaaagaattctattttgagacatctgtagttgatgcaaagtatttctgtaatcctcaatgacagtacttacatatttgcatagaattttttttttaatttttgaggaaacctctctggagtctgtatttataggagcatcctgaaagtccctattatgtagctggtgggagcgagagagggacagccacactcgtgctgtgagcagagcacaacttcaggcagagtgaatgccttctgagttctcattggaagctttctgttgctcagcctctggcagatttcagaaccttctacttaagccaggtgtggtggtgcgtgctcctaggcacagcgactcggggggctgaggcagaaggatcacttgagcccaaagttggaggccagcctgggcaacatagcgaggcctgtctccttaaaaaataaataaataaataataaataaataaataaataaaaaccttgtccttgactattgtgctgtctgctgcccctttgtagggatggggttggggtcagaataagcatgtgcatgaatggcggaaagctttggtggtgtttgtttgtttgtttgttttttgagaggtgggggagtcagcagtgaacctttctggttaaagaacaacgtacataatttctattatgagatttagaaggttaaatacttttttttttcaggcctaccaagttgatagaccaaaagtatatagtagaacagcacagtagaaaaaatttaaaagtgaatttcttatggtccaaaaggatggatagtcacagtccataacctttcataatatatgctggaattggaatctcttgtcatcttgctttgctctgaattttagaactagaagtgtgcatgtatgtcaaaagattatgcagagctattttctttgctaacaatgtaaacatttgcaccccatgaatgggactttataatctggaagtgagcctaaggttgcgtatactgaagtcatgttttaaaagttaaggttgacttaaacatatacaaggctgtattttaattgtaactagaaatcatttactatgcatacagaacctcatgtatcttatcatggaatttgtgaattaatgggccttgccgaattcaagggtaagggaaactggtaacaacttgttttaaatcaacatactataagctcctgcttgcttgactcaagttgtttgaaaatctgaattaaacaggatctcattgtcaggaaacatcttctaagcttgacatctacgtttaagaagggaacgtggaagagaaggtgagacatgaaactaaaacagctgggagggtaggatcagactgcacctgatttttggaccaaagtttcatataggaataaataaaaaggaggaccacttgtgagccaacctaggaaggacttgccagaaagtagcagctcctgctgcaaaatacagtgccttcaaaatgattctctgtgtgaattgcatgcaatttcatgtaaccataaagtgtaacctgtatgtgcatgacatgtgtctagaatgtgtaaagttaggattcagcaggaaggggcctggccctgtcactgtggtggatcagtggacctgctgaagtcactggactcatgtgacttaggtttgcagcatcagacccctgtgtttgcattaagtggccacatcgttgaaatcggatcaatctctccctcagctttctttcctactttgcagctttgctggttttaactgcttcattcttctgcttcttggtatccttttttcttttgaaataaaaacatgaaatacttaattc

SEQ ID NO: 73 - DNA, 529 bp, Homo sapiens
gcagttgtctttggtagtttttttgcactaacttcaggaaccagctcatgatctcaggatgtatggaaaaataatctttgtattactattgtcagaaattgtgagcatatcagcattaagtaccactgaggtggcaatgcacacttcaacctcttcttcagtcacaaagagttacatctcatcacagacaaatggagaaacgggacaacttgtccatcgtttcactgtaccagctcctgtagtgataatactcattattttgtgtgtgatggctggtattattggaacgatcctcttaatttcttacactattcgccgactgataaaggcatgaggatgtggcctgcatgctgcctgatcttgcctagaaccggctgcacctgctgttctcttgtttatgcaaactggctgcacctgctattcctttgcttatgcccctacccctggctatcctaattccctgttctcctgcctcactattactgtattctctacttctaaataaaaataaaacaaaatacaaaccgtt

SEQ ID NO: 74 - DNA, 6613 bp, Homo sapiens
tttgtttacctaagcaagcctgggcaatggcgggcgcctctcccccagcctcgctgccgccttgcagtttgatctcagactgctgtgctagcaatcagcgagactccgtgggcgtaggaccctccgagccagaaagattatcactttgaatatacggaatgtgatagcagtggctccaggtggagagttgccattccaaattctgcagtggactgctctggcctgcctgacccagtgagaggcaaagaatgcactttctcctgtgcttctggagagtatctagaaatgaagaaccaggtatgcagtaagtgtggtgaaggcacctattccttgggcagtggcatcaaatttgatgaatgggatgaattgccggcaggattttctaacatcgcaacattcatggacactgtggtgggcccttctgacagcaggccagacggctgtaacaactcttcttggatccctcgtggaaactacatagaatctaatcgtgatgactgcacggtgtctttgatctatgctgtgcaccttaagaagtcaggctatgtcttctttgagtaccagtatgtcgacaacaacatcttctttgagttctttattcaaaatgatcagtgccaggagatggacaccaccactgacaagtgggtaaaacttacagacaatggagaatggggctctcattctgtaatgctgaaatcaggcacaaacatactctactggagaactacaggcatccttatgggttctaaggcggtcaagcctgtgctggtaaaaaatatcacaattgaaggggtggcgtacacatcagaatgttttccttgcaagccaggcacattcagcaacaaaccaggttcattcaactgccaggtgtgtcccagaaacacctattctgagaaaggagccaaagaatgtataaggtgtaaagacgactctcaattttcagaggaaggatccagtgagtgtacagagcgccctccctgtaccacaaaagactatttccagatccatactccatgtgatgaagaaggaaagacacagataatgtacaagtggatagagcccaaaatctgccgggaggatctcacagatgctattagattgcccccttctggagagaagaaggattgtccgccttgcaaccctggattttataacaatggatcatcttcttgccatccctgtcctcctggaacattttcagatggaaccaaagaatgtagaccatgtccagcaggaacggagcctgcacttggctttgaatataaatggtggaatgtccttcctggcaacatgaaaacttcctgcttcaatgttgggaattcaaagtgcgatggaatgaatggttgggaggtggctggagatcatatccagagtggggctggaggttctgacaatgattacctgatcttaaacttgcatatcccaggatttaaaccaccaacatctatgactggagccacgggttctgaactaggaagaataacatttgtctttgagaccctctgttcagctgactgtgttttgtacttcatggtggatattaatagaaaaagtacaaatgtggtagaatcgtggggtggaaccaaagaaaaacaagcttacacccatatcatcttcaagaatgcaacttttacatttacatgggcattccagagaactaatcagggtcaagataatagacggttcatcaatgacatggtgaagatttattctatcacagccactaatgcagttgatggggtggcgtcctcatgccgtgcctgtgccctcggttctgaacagtcgggttcatcgtgtgtcccctgccctccaggccactacattgagaaagaaaccaaccagtgcaaggaatgtccacctgacacctacctgtccatacatcaggtctatggcaaagaggcttgtattccatgcgggcctgggagtaaaaacaatcaggaccattcggtttgctatagtgactgctttttctaccatgaaaaagaaaatcagagtttgcactatgactttagcaacctcagcagtgtgggctcattaatgaatggccccagcttcacctccaaaggaacaaaatacttccatttcttcaatatcagtttatgtgggcatgaggggaagaagatggctctctgtaccaacaatataacagactttacagtaaaagaaatagtggcagggtcagatgattacacaaatttggtaggggcatttgtatgccagtcaacaattattccttctgaaagtaagggtttccgagcagccttatcatcacaatccatcattctggcagatacattcataggagtcacagttgaaaccacattgaaaaatattaatataaaagaagatatgttcccagttccaacaagccaaataccagatgtgcatttcttttataagtcttctacagcaacaacatcttgtattaatggccgatcaactgctgtgaaaatgaggtgtaatcctactaaatctggagcaggagtgatttcagtccccagcaagtgcccagcaggtacctgtgatgggtgtacgttctatttcctgtgggagagtgctgaagcttgccctctgtgtacggagcatgacttccatgagattgagggagcctgcaagagaggatttcaggaaaccttgtatgtgtggaatgaacctaaatggtgcattaaaggaatttctttgcctgagaaaaagttggcaacctgtgaaacggttgacttttggctgaaggtgggagccggtgtgggagcttttactgccgttttgctggtggctctgacctgctacttctggaaaaagaatcaaaaactggaatacaaatattccaagttagtaatgacgactaactcaaaagagtgtgaactcccggctgcagacagttgtgctatcatggaaggagaagataatgaagaggaagttgtatattccaataaacagtcactactaggaaaactcaaatctttggcaaccaaggaaaaagaagaccattttgaatctgttcaactgaaaacctcaagatccccaaatatatgaagagacagtgctgtagccttgagactaatgaacaaagaaacctgctctagttttacaggaccatattttagggtctgtcctcatacctgtcacattggtgatctcacagaggagggccatgccgctgaaaagggaaggagattgaaacatttgattgccttatcacatggtcaagtaccttgccaaataaaggaaagcaaatgatttgggtctcaactgaagatgaagctcaactcaggaagagatttatctgtatatacacataactgaaaaccaagtttaagcccaccaatgcactgctgatgcatgccatataattaatgggtaacttttattctttatgatgtctacataacaagtgtgatttggaaggcacatgtgagcatatgcattatgatccaatttatgttttttctttgtttatattttggggaaaattaaaatttttttaaggtatatttttcccattatttattttcctgaccttaaaacagcttttctactaaaaaatggtgagcaatgaagacaataaatttttcatttttccataggttatcttctcttgatttaaatttcaggaagagttagcatgtgcttgggttatctagatttataattgcctttgaaattccatcctcgttggagctggtaagaagggcttgactgaaagtttgaaggaatctaaaaaacaaaaaagtaagaaaggtaacgagaagccctaattctccattaatgcaaactagctgctagtatcatagaagtcaaatgacttaaaacagtttatgtagtgctagaagtataattaaagtaaataggaaagcttgtcaatcaaatcactggcaaaatcatgaagaagagagtgagaaggtttgtctataagtacagatgactgtatgaaatactggggtaatttcatggtctccagaaaatgtcagtgggacttttgttctttgtcaagcaccagaggttatatggttatttttctgctgcaagactttgaggatgttgactttctcagaaactttttaaaaaaataatccaataaggcaggaattcagttttgaaaaattacatataattgtattcataataagaatgtggttatttcataagcagttatgaaagaattattgttcttattcaaaagtgatccagataattgtgatattttctatggtgggctactggtattagcacgacttggatattatttgttgaaggaagtatgaatgaagttggatttgaccaatttcgtgtaaaccttaattgatttaaaactgggaaagaggggggtttcctggccattgctgatctaaggtgctcttatttgtttccaataaacagtaatctttatagaccttaatgcagatttaaaaaaatagttgtgattggctgagagaggcagggcatatatgtagggaaatgatttgccccaagcattccaatgaagtatgacttgtaacttttgtgtctgaaggtggtgtctttatttttgtggaaaatgggagaaaaatgaataattgtgtttatttggctgattggtaatacactagaccattctgttattattgaatgaatgttttgtgtatatctctgctgttgcacatatgagtataggtgaggttgtcattgtttgctctgggattcagggagggagtcactttgcataaacctttttttgcatttaatttcttgaatgttcttataaagaagacattatgttggcattcttcatttttatcctgccaacagagtgcttatgagcatgtctgcattttgatcaaaatttaaacagaagagtgaaaatacatttgaaatgaaccctttcagaggaaccctggcaaagctgtatagactggacagagtgagaaaacttccacagccacctgtcacctttctcctcatcttccactgtgttcaatatgtatgttccaagccatagagataattgggattttctcccaggtagcttctttcttctcctgtcactggactaaaatctctgacatgtcaaaaatgccttaaattttaatgaactctccgaaaatgtagttgatattggagaatttattttatttctaattttagatattaaatatattttgtcagcacagtcccatctttgggaaggaggtgattttttcccttggattccagtggtttgtcattttatttcaagcactgaagaagtatgacagaaagaatattatggggaaaatatttagaccaatcctggctataaaatttcctttagttttatgcctggcctttgcaaagctcagtgaaatgttgaaaggaataaattaatcatgtttctgtgacttttgattgacacttgttccttttcccccctaagtggtagaagaagttatttgttatttttctaaaaggcacaattttgaagccttaactacttcattaagtcaactgttgcctataacatctcttagcactcgtcaaaacgtatttaaatcaattttccaatggatgagaacatgtcttctgtggataaattatattatgtcatttaacaacattgagcattttgatatgtgttcactgaattaaaaaacctgaatttcattattgttgacttttcccctctttagttactagtaatcacatcctttctaggattaaaaatatttcatagtatttttgtgtagatgtctgtccttattttcttcccaaagaaaaaaggttgtttaaattgattatgtggaagaattacttgggtccagtctttagcatctggggtctccaggtccccaggtgggtcatgattgactgcttcttcaagacccatcttgccaactctcacttgatgtctgtcaatagaactacttcctgtggcacatggttatttctaatgggaggctaatgtgtacataatttctctcttcctcatagaaataaatttctctgggggttgctgtgagaggatgacttcattagccatgtttaaagtgagtgtactgctcacgtttatctttgtacactaagagtatgtagagttgatcttcagagaaactaaacctccctcatatctatttatagtaatcatgaatatgattgcagttgacaggcccaactcctaaactgagtttgcccaaagaaaatgtccttagaggagtaaacttttagaaatctcaacacccgactcattcgttggaagctaaaatggaattcatcttcatactaactggctacagattattctcttgctggattttacttttattttaacatttttacatgagttccttttagaatcataaatgaaagaagtaaaactttaagatgggaatgaataattgaaaagagaattatatttactattataattgatattattcgctattatgattacacttgtctagatcagagcccagcaaacattttttttgtaaagggtcagatagtacatagttttggctttgcagggcatgtgggctctattgcatttactcaactctgccattgtagtatgaaagcaaccacatacaaaatgtaaatggatgggcgtggctgcattccaataaaactttatttatggacactgaaaaaaaaaaaaaaaaaa

SEQ ID NO: 75 - DNA, 6330 bp, Homo sapiens
tttgtttacctaagcaagcctgggcaatggcgggcgcctctcccccagcctcgctgccgccttgcagtttgatctcagactgctgtgctagcaatcagcgagactccgtgggcgtaggaccctccgagccagctcttcttggatccctcgtggaaactacatagaatctaatcgtgatgactgcacggtgtctttgatctatgctgtgcaccttaagaagtcaggctatgtcttctttgagtaccagtatgtcgacaacaacatcttctttgagttctttattcaaaatgatcagtgccaggagatggacaccaccactgacaagtgggtaaaacttacagacaatggagaatggggctctcattctgacagctccttaaatgcttgaaggcaattaccaggtaatgctgaaatcaggcacaaacatactctactggagaactacaggcatccttatgggttctaaggcggtcaagcctgtgctggtaaaaaatatcacaattgaaggggtggcgtacacatcagaatgttttccttgcaagccaggcacattcagcaacaaaccaggttcattcaactgccaggtgtgtcccagaaacacctattctgagaaaggagccaaagaatgtataaggtgtaaagacgactctcaattttcagaggaaggatccagtgagtgtacagagcgccctccctgtaccacaaaagactatttccagatccatactccatgtgatgaagaaggaaagacacagataatgtacaagtggatagagcccaaaatctgccgggaggatctcacagatgctattagattgcccccttctggagagaagaaggattgtccgccttgcaaccctggattttataacaatggatcatcttcttgccatccctgtcctcctggaacattttcagatggaaccaaagaatgtagaccatgtccagcaggaacggagcctgcacttggctttgaatataaatggtggaatgtccttcctggcaacatgaaaacttcctgcttcaatgttgggaattcaaagtgcgatggaatgaatggttgggaggtggctggagatcatatccagagtggggctggaggttctgacaatgattacctgatcttaaacttgcatatcccaggatttaaaccaccaacatctatgactggagccacgggttctgaactaggaagaataacatttgtctttgagaccctctgttcagctgactgtgttttgtacttcatggtggatattaatagaaaaagtacaaatgtggtagaatcgtggggtggaaccaaagaaaaacaagcttacacccatatcatcttcaagaatgcaacttttacatttacatgggcattccagagaactaatcagggtcaagataatagacggttcatcaatgacatggtgaagatttattctatcacagccactaatgcagttgatggggtggcgtcctcatgccgtgcctgtgccctcggttctgaacagtcgggttcatcgtgtgtcccctgccctccaggccactacattgagaaagaaaccaaccagtgcaaggaatgtccacctgacacctacctgtccatacatcaggtctatggcaaagaggcttgtattccatgcgggcctgggagtaaaaacaatcaggaccattcggtttgctatagtgactgctttttctaccatgaaaaagaaaatcagagtttgcactatgactttagcaacctcagcagtgtgggctcattaatgaatggccccagcttcacctccaaaggaacaaaatacttccatttcttcaatatcagtttatgtgggcatgaggggaagaagatggctctctgtaccaacaatataacagactttacagtaaaagaaatagtggcagggtcagatgattacacaaatttggtaggggcatttgtatgccagtcaacaattattccttctgaaagtaagggtttccgagcagccttatcatcacaatccatcattctggcagatacattcataggagtcacagttgaaaccacattgaaaaatattaatataaaagaagatatgttcccagttccaacaagccaaataccagatgtgcatttcttttataagtcttctacagcaacaacatcttgtattaatggccgatcaactgctgtgaaaatgaggtgtaatcctactaaatctggagcaggagtgatttcagtccccagcaagtgcccagcaggtacctgtgatgggtgtacgttctatttcctgtgggagagtgctgaagcttgccctctgtgtacggagcatgacttccatgagattgagggagcctgcaagagaggatttcaggaaaccttgtatgtgtggaatgaacctaaatggtgcattaaaggaatttctttgcctgagaaaaagttggcaacctgtgaaacggttgacttttggctgaaggtgggagccggtgtgggagcttttactgccgttttgctggtggctctgacctgctacttctggaaaaagaatcaaaaactggaatacaaatattccaagttagtaatgacgactaactcaaaagagtgtgaactcccggctgcagacagttgtgctatcatggaaggagaagataatgaagaggaagttgtatattccaataaacagtcactactaggaaaactcaaatctttggcaaccaaggaaaaagaagaccattttgaatctgttcaactgaaaacctcaagatccccaaatatatgaagagacagtgctgtagccttgagactaatgaacaaagaaacctgctctagttttacaggaccatattttagggtctgtcctcatacctgtcacattggtgatctcacagaggagggccatgccgctgaaaagggaaggagattgaaacatttgattgccttatcacatggtcaagtaccttgccaaataaaggaaagcaaatgatttgggtctcaactgaagatgaagctcaactcaggaagagatttatctgtatatacacataactgaaaaccaagtttaagcccaccaatgcactgctgatgcatgccatataattaatgggtaacttttattctttatgatgtctacataacaagtgtgatttggaaggcacatgtgagcatatgcattatgatccaatttatgttttttctttgtttatattttggggaaaattaaaatttttttaaggtatatttttcccattatttattttcctgaccttaaaacagcttttctactaaaaaatggtgagcaatgaagacaataaatttttcatttttccataggttatcttctcttgatttaaatttcaggaagagttagcatgtgcttgggttatctagatttataattgcctttgaaattccatcctcgttggagctggtaagaagggcttgactgaaagtttgaaggaatctaaaaaacaaaaaagtaagaaaggtaacgagaagccctaattctccattaatgcaaactagctgctagtatcatagaagtcaaatgacttaaaacagtttatgtagtgctagaagtataattaaagtaaataggaaagcttgtcaatcaaatcactggcaaaatcatgaagaagagagtgagaaggtttgtctataagtacagatgactgtatgaaatactggggtaatttcatggtctccagaaaatgtcagtgggacttttgttctttgtcaagcaccagaggttatatggttatttttctgctgcaagactttgaggatgttgactttctcagaaactttttaaaaaaataatccaataaggcaggaattcagttttgaaaaattacatataattgtattcataataagaatgtggttatttcataagcagttatgaaagaattattgttcttattcaaaagtgatccagataattgtgatattttctatggtgggctactggtattagcacgacttggatattatttgttgaaggaagtatgaatgaagttggatttgaccaatttcgtgtaaaccttaattgatttaaaactgggaaagaggggggtttcctggccattgctgatctaaggtgctcttatttgtttccaataaacagtaatctttatagaccttaatgcagatttaaaaaaatagttgtgattggctgagagaggcagggcatatatgtagggaaatgatttgccccaagcattccaatgaagtatgacttgtaacttttgtgtctgaaggtggtgtctttatttttgtggaaaatgggagaaaaatgaataattgtgtttatttggctgattggtaatacactagaccattctgttattattgaatgaatgttttgtgtatatctctgctgttgcacatatgagtataggtgaggttgtcattgtttgctctgggattcagggagggagtcactttgcataaacctttttttgcatttaatttcttgaatgttcttataaagaagacattatgttggcattcttcatttttatcctgccaacagagtgcttatgagcatgtctgcattttgatcaaaatttaaacagaagagtgaaaatacatttgaaatgaaccctttcagaggaaccctggcaaagctgtatagactggacagagtgagaaaacttccacagccacctgtcacctttctcctcatcttccactgtgttcaatatgtatgttccaagccatagagataattgggattttctcccaggtagcttctttcttctcctgtcactggactaaaatctctgacatgtcaaaaatgccttaaattttaatgaactctccgaaaatgtagttgatattggagaatttattttatttctaattttagatattaaatatattttgtcagcacagtcccatctttgggaaggaggtgattttttcccttggattccagtggtttgtcattttatttcaagcactgaagaagtatgacagaaagaatattatggggaaaatatttagaccaatcctggctataaaatttcctttagttttatgcctggcctttgcaaagctcagtgaaatgttgaaaggaataaattaatcatgtttctgtgacttttgattgacacttgttccttttcccccctaagtggtagaagaagttatttgttatttttctaaaaggcacaattttgaagccttaactacttcattaagtcaactgttgcctataacatctcttagcactcgtcaaaacgtatttaaatcaattttccaatggatgagaacatgtcttctgtggataaattatattatgtcatttaacaacattgagcattttgatatgtgttcactgaattaaaaaacctgaatttcattattgttgacttttcccctctttagttactagtaatcacatcctttctaggattaaaaatatttcatagtatttttgtgtagatgtctgtccttattttcttcccaaagaaaaaaggttgtttaaattgattatgtggaagaattacttgggtccagtctttagcatctggggtctccaggtccccaggtgggtcatgattgactgcttcttcaagacccatcttgccaactctcacttgatgtctgtcaatagaactacttcctgtggcacatggttatttctaatgggaggctaatgtgtacataatttctctcttcctcatagaaataaatttctctgggggttgctgtgagaggatgacttcattagccatgtttaaagtgagtgtactgctcacgtttatctttgtacactaagagtatgtagagttgatcttcagagaaactaaacctccctcatatctatttatagtaatcatgaatatgattgcagttgacaggcccaactcctaaactgagtttgcccaaagaaaatgtccttagaggagtaaacttttagaaatctcaacacccgactcattcgttggaagctaaaatggaattcatcttcatactaactggctacagattattctcttgctggattttacttttattttaacatttttacatgagttccttttagaatcataaatgaaagaagtaaaactttaagatgggaatgaataattgaaaagagaattatatttactattataattgatattattcgctattatgattacacttgtctagatcagagcccagcaaacattttttttgtaaagggtcagatagtacatagttttggctttgcagggcatgtgggctctattgcatttactcaactctgccattgtagtatgaaagcaaccacatacaaaatgtaaatggatgggcgtggctgcattccaataaaactttatttatggacactgaaaaaaaaaaaaaaaaaa

SEQ ID NO: 76 - DNA, 6452 bp, Homo sapiens
gtgctatgcagagaaggtcaaagacaatggccttctcattcctgatgtccgcatggtgatgtggcttgatgtttctattctcacttgtcattgacacagtgagggaggcaaaacagtgtggatgcagcagaataaccacaaccaggattttgaactgaataagtaagaaagattatcactttgaatatacggaatgtgatagcagtggctccaggtggagagttgccattccaaattctgcagtggactgctctggcctgcctgacccagtgagaggcaaagaatgcactcttcttggatccctcgtggaaactacatagaatctaatcgtgatgactgcacggtgtctttgatctatgctgtgcaccttaagaagtcaggctatgtcttctttgagtaccagtatgtcgacaacaacatcttctttgagttctttattcaaaatgatcagtgccaggagatggacaccaccactgacaagtgggtaaaacttacagacaatggagaatggggctctcattctgtaatgctgaaatcaggcacaaacatactctactggagaactacaggcatccttatgggttctaaggcggtcaagcctgtgctggtaaaaaatatcacaattgaaggggtggcgtacacatcagaatgttttccttgcaagccaggcacattcagcaacaaaccaggttcattcaactgccaggtgtgtcccagaaacacctattctgagaaaggagccaaagaatgtataaggtgtaaagacgactctcaattttcagaggaaggatccagtgagtgtacagagcgccctccctgtaccacaaaagactatttccagatccatactccatgtgatgaagaaggaaagacacagataatgtacaagtggatagagcccaaaatctgccgggaggatctcacagatgctattagattgcccccttctggagagaagaaggattgtccgccttgcaaccctggattttataacaatggatcatcttcttgccatccctgtcctcctggaacattttcagatggaaccaaagaatgtagaccatgtccagcaggaacggagcctgcacttggctttgaatataaatggtggaatgtccttcctggcaacatgaaaacttcctgcttcaatgttgggaattcaaagtgcgatggaatgaatggttgggaggtggctggagatcatatccagagtggggctggaggttctgacaatgattacctgatcttaaacttgcatatcccaggatttaaaccaccaacatctatgactggagccacgggttctgaactaggaagaataacatttgtctttgagaccctctgttcagctgactgtgttttgtacttcatggtggatattaatagaaaaagtacaaatgtggtagaatcgtggggtggaaccaaagaaaaacaagcttacacccatatcatcttcaagaatgcaacttttacatttacatgggcattccagagaactaatcagggtcaagataatagacggttcatcaatgacatggtgaagatttattctatcacagccactaatgcagttgatggggtggcgtcctcatgccgtgcctgtgccctcggttctgaacagtcgggttcatcgtgtgtcccctgccctccaggccactacattgagaaagaaaccaaccagtgcaaggaatgtccacctgacacctacctgtccatacatcaggtctatggcaaagaggcttgtattccatgcgggcctgggagtaaaaacaatcaggaccattcggtttgctatagtgactgctttttctaccatgaaaaagaaaatcagagtttgcactatgactttagcaacctcagcagtgtgggctcattaatgaatggccccagcttcacctccaaaggaacaaaatacttccatttcttcaatatcagtttatgtgggcatgaggggaagaagatggctctctgtaccaacaatataacagactttacagtaaaagaaatagtggcagggtcagatgattacacaaatttggtaggggcatttgtatgccagtcaacaattattccttctgaaagtaagggtttccgagcagccttatcatcacaatccatcattctggcagatacattcataggagtcacagttgaaaccacattgaaaaatattaatataaaagaagatatgttcccagttccaacaagccaaataccagatgtgcatttcttttataagtcttctacagcaacaacatcttgtattaatggccgatcaactgctgtgaaaatgaggtgtaatcctactaaatctggagcaggagtgatttcagtccccagcaagtgcccagcaggtacctgtgatgggtgtacgttctatttcctgtgggagagtgctgaagcttgccctctgtgtacggagcatgacttccatgagattgagggagcctgcaagagaggatttcaggaaaccttgtatgtgtggaatgaacctaaatggtgcattaaaggaatttctttgcctgagaaaaagttggcaacctgtgaaacggttgacttttggctgaaggtgggagccggtgtgggagcttttactgccgttttgctggtggctctgacctgctacttctggaaaaagaatcaaaaactggaatacaaatattccaagttagtaatgacgactaactcaaaagagtgtgaactcccggctgcagacagttgtgctatcatggaaggagaagataatgaagaggaagttgtatattccaataaacagtcactactaggaaaactcaaatctttggcaaccaaggaaaaagaagaccattttgaatctgttcaactgaaaacctcaagatccccaaatatatgaagagacagtgctgtagccttgagactaatgaacaaagaaacctgctctagttttacaggaccatattttagggtctgtcctcatacctgtcacattggtgatctcacagaggagggccatgccgctgaaaagggaaggagattgaaacatttgattgccttatcacatggtcaagtaccttgccaaataaaggaaagcaaatgatttgggtctcaactgaagatgaagctcaactcaggaagagatttatctgtatatacacataactgaaaaccaagtttaagcccaccaatgcactgctgatgcatgccatataattaatgggtaacttttattctttatgatgtctacataacaagtgtgatttggaaggcacatgtgagcatatgcattatgatccaatttatgttttttctttgtttatattttggggaaaattaaaatttttttaaggtatatttttcccattatttattttcctgaccttaaaacagcttttctactaaaaaatggtgagcaatgaagacaataaatttttcatttttccataggttatcttctcttgatttaaatttcaggaagagttagcatgtgcttgggttatctagatttataattgcctttgaaattccatcctcgttggagctggtaagaagggcttgactgaaagtttgaaggaatctaaaaaacaaaaaagtaagaaaggtaacgagaagccctaattctccattaatgcaaactagctgctagtatcatagaagtcaaatgacttaaaacagtttatgtagtgctagaagtataattaaagtaaataggaaagcttgtcaatcaaatcactggcaaaatcatgaagaagagagtgagaaggtttgtctataagtacagatgactgtatgaaatactggggtaatttcatggtctccagaaaatgtcagtgggacttttgttctttgtcaagcaccagaggttatatggttatttttctgctgcaagactttgaggatgttgactttctcagaaactttttaaaaaaataatccaataaggcaggaattcagttttgaaaaattacatataattgtattcataataagaatgtggttatttcataagcagttatgaaagaattattgttcttattcaaaagtgatccagataattgtgatattttctatggtgggctactggtattagcacgacttggatattatttgttgaaggaagtatgaatgaagttggatttgaccaatttcgtgtaaaccttaattgatttaaaactgggaaagaggggggtttcctggccattgctgatctaaggtgctcttatttgtttccaataaacagtaatctttatagaccttaatgcagatttaaaaaaatagttgtgattggctgagagaggcagggcatatatgtagggaaatgatttgccccaagcattccaatgaagtatgacttgtaacttttgtgtctgaaggtggtgtctttatttttgtggaaaatgggagaaaaatgaataattgtgtttatttggctgattggtaatacactagaccattctgttattattgaatgaatgttttgtgtatatctctgctgttgcacatatgagtataggtgaggttgtcattgtttgctctgggattcagggagggagtcactttgcataaacctttttttgcatttaatttcttgaatgttcttataaagaagacattatgttggcattcttcatttttatcctgccaacagagtgcttatgagcatgtctgcattttgatcaaaatttaaacagaagagtgaaaatacatttgaaatgaaccctttcagaggaaccctggcaaagctgtatagactggacagagtgagaaaacttccacagccacctgtcacctttctcctcatcttccactgtgttcaatatgtatgttccaagccatagagataattgggattttctcccaggtagcttctttcttctcctgtcactggactaaaatctctgacatgtcaaaaatgccttaaattttaatgaactctccgaaaatgtagttgatattggagaatttattttatttctaattttagatattaaatatattttgtcagcacagtcccatctttgggaaggaggtgattttttcccttggattccagtggtttgtcattttatttcaagcactgaagaagtatgacagaaagaatattatggggaaaatatttagaccaatcctggctataaaatttcctttagttttatgcctggcctttgcaaagctcagtgaaatgttgaaaggaataaattaatcatgtttctgtgacttttgattgacacttgttccttttcccccctaagtggtagaagaagttatttgttatttttctaaaaggcacaattttgaagccttaactacttcattaagtcaactgttgcctataacatctcttagcactcgtcaaaacgtatttaaatcaattttccaatggatgagaacatgtcttctgtggataaattatattatgtcatttaacaacattgagcattttgatatgtgttcactgaattaaaaaacctgaatttcattattgttgacttttcccctctttagttactagtaatcacatcctttctaggattaaaaatatttcatagtatttttgtgtagatgtctgtccttattttcttcccaaagaaaaaaggttgtttaaattgattatgtggaagaattacttgggtccagtctttagcatctggggtctccaggtccccaggtgggtcatgattgactgcttcttcaagacccatcttgccaactctcacttgatgtctgtcaatagaactacttcctgtggcacatggttatttctaatgggaggctaatgtgtacataatttctctcttcctcatagaaataaatttctctgggggttgctgtgagaggatgacttcattagccatgtttaaagtgagtgtactgctcacgtttatctttgtacactaagagtatgtagagttgatcttcagagaaactaaacctccctcatatctatttatagtaatcatgaatatgattgcagttgacaggcccaactcctaaactgagtttgcccaaagaaaatgtccttagaggagtaaacttttagaaatctcaacacccgactcattcgttggaagctaaaatggaattcatcttcatactaactggctacagattattctcttgctggattttacttttattttaacatttttacatgagttccttttagaatcataaatgaaagaagtaaaactttaagatgggaatgaataattgaaaagagaattatatttactattataattgatattattcgctattatgattacacttgtctagatcagagcccagcaaacattttttttgtaaagggtcagatagtacatagttttggctttgcagggcatgtgggctctattgcatttactcaactctgccattgtagtatgaaagcaaccacatacaaaatgtaaatggatgggcgtggctgcattccaataaaactttatttatggacactgaaaaaaaaaaaaaaaaaa

SEQ ID NO: 77 - DNA, 3207 bp, Homo sapiens
gagggcgcccgccgagcctccccggcctgtgcagacggcgcgcgcggcgggagggcgcggaccagcgtccccagcccggccccgggcggaaggcgagcggagcgcggccgcgcgggcagcagacggcagacggtgcccggcgcccacgggggctgcccctgatggggcctggcaatgactgagcaggcccagccccagaggacaaggaagagaaggcatattgaggagggcaagaagtgacgcccggtgtagaatgactgccctgggagggtggttccttgggccctggcagggttgctgacccttaccctgcaaaacacaaagagcaggactccagactcttcttgtgaatggtcccctgccctgcagctccaccatgaggcttctcgtggccccactcttgctagcttgggtggctggtgccactgccgctgtgcccgtggtaccctggcatgttccctgcccccctcagtgtgcctgccagatccggccctggtatacgccccgctcgtcctaccgcgaggctaccactgtggactgcaatgacctattcctgacggcagtccccccggcactccccgcaggcacacagaccctgctcctgcagagcaacagcattgtccgtgtggaccagagtgagctgggctacctggccaatctcacagagctggacctgtcccagaacagcttttcggatgcccgagactgtgatttccatgccctgccccagctgctgagcctgcacctagaggagaaccagctgacccggctggaggaccacagctttgcagggctggccagcctacaggaactctatctcaaccacaaccagctctaccgcatcgcccccagggccttttctggcctcagcaacttgctgcggctgcacctcaactccaacctcctgagggccattgacagccgctggtttgaaatgctgcccaacttggagatactcatgattggcggcaacaaggtagatgccatcctggacatgaacttccggcccctggccaacctgcgtagcctggtgctagcaggcatgaacctgcgggagatctccgactatgccctggaggggctgcaaagcctggagagcctctccttctatgacaaccagctggcccgggtgcccaggcgggcactggaacaggtgcccgggctcaagttcctagacctcaacaagaacccgctccagcgggtagggccgggggactttgccaacatgctgcaccttaaggagctgggactgaacaacatggaggagctggtctccatcgacaagtttgccctggtgaacctccccgagctgaccaagctggacatcaccaataacccacggctgtccttcatccacccccgcgccttccaccacctgccccagatggagaccctcatgctcaacaacaacgctctcagtgccttgcaccagcagacggtggagtccctgcccaacctgcaggaggtaggtctccacggcaaccccatccgctgtgactgtgtcatccgctgggccaatgccacgggcacccgtgtccgcttcatcgagccgcaatccaccctgtgtgcggagcctccggacctccagcgcctcccggtccgtgaggtgcccttccgggagatgacggaccactgtttgcccctcatctccccacgaagcttccccccaagcctccaggtagccagtggagagagcatggtgctgcattgccgggcactggccgaacccgaacccgagatctactgggtcactccagctgggcttcgactgacacctgcccatgcaggcaggaggtaccgggtgtaccccgaggggaccctggagctgcggagggtgacagcagaagaggcagggctatacacctgtgtggcccagaacctggtgggggctgacactaagacggttagtgtggttgtgggccgtgctctcctccagccaggcagggacgaaggacaggggctggagctccgggtgcaggagacccacccctatcacatcctgctatcttgggtcaccccacccaacacagtgtccaccaacctcacctggtccagtgcctcctccctccggggccagggggccacagctctggcccgcctgcctcggggaacccacagctacaacattacccgcctccttcaggccacggagtactgggcctgcctgcaagtggcctttgctgatgcccacacccagttggcttgtgtatgggccaggaccaaagaggccacttcttgccacagagccttaggggaccgtcctgggctcattgccatcctggctctcgctgtccttctcctggcagctgggctagcggcccaccttggcacaggccaacccaggaagggtgtgggtgggaggcggcctctccctccagcctgggctttctggggctggagtgccccttctgtccgggttgtgtctgctcccctcgtcctgccctggaatccagggaggaagctgcccagatcctcagaaggggagacactgttgccaccattgtctcaaaattcttgaagctcagcctgttctcagcagtagagaaatcactaggactactttttaccaaaagagaagcagtctgggccagatgccctgccaggaaagggacatggacccacgtgcttgaggcctggcagctgggccaagacagatggggctttgtggccctgggggtgcttctgcagcctcgaaaaagttgcccttacctcctagggtcacctctgctgccattctgaggaacatctccaaggaacaggagggactttggctagagcctcctgcctccccatcttctctctgcccagaggctcctgggcctggcttggctgtcccctacctgtgtccccgggctgcaccccttcctcttctctttctctgtacagtctcagttgcttgctcttgtgcctcctgggcaagggctgaaggaggccactccatctcacctcggggggctgccctcaatgtgggagtgaccccagccagatctgaaggacatttgggagagggatgcccaggaacgcctcatctcagcagcctgggctcggcattccgaagctgactttctataggcaattttgtacctttgtggagaaatgtgtcacctcccccaacccgattcactcttttctcctgttttgtaaaaaataaaaataaataataacaataatacgggggaaaggaacgaaaggaaaaaaaaaaaaaaa

SEQ ID NO: 78 - DNA, 4353 bp, Homo sapiens
tgagctgccgatcaccggatgccccagattcctgggacccaatcccggatttcagaacctcaggaccttgcaagtccgagctaggatttctccctggactttagattcctggaacgggacgtcaggccgtattccggatccctagatcccgtgggagattctccgattccgaacggattccagatcccaagattcctgatctgccggcccaggctcctgccccgcccccggttcccagtgcgcggcgccccgcgcctgagcgcccccgcatggcggggccgtgtccccggtccggggcggagcgcgccggcagctgctggcaggacccgctggccgtggcgctgagccggggccggcagctcgcggcgcccccgggccggggctgcgcgcggagccggccgctcagcgtggtctacgtgctgacccgggagccgcagcccgggctcgagcctcgggagggaaccgaggcggagccgctgcccctgcgctgcctgcgcgaggcttgcgcgcaggtcccccggccgcggccgcccccgcagctgcgcagcctgcccttcgggacgctggagctaggcgacaccgcggctctggatgccttctacaacgcggatgtggtggtgctggaggtgagcagctcgctggtacagccctccctgttctaccaccttggtgtgcgtgagagcttcagcatgaccaacaatgtgctcctctgctcccaggccgacctccctgacctgcaggccctgcgggaggatgttttccagaagaactcggattgcgttggcagctacacactgatcccctatgtggtgacggccactggtcgggtgctgtgtggtgatgcaggccttctgcggggcctggctgatgggctggtacaggctggagtggggaccgaggccctgctcactcccctggtgggccggcttgcccgcctgctggaggccacacccacagactcttgtggctatttccgggagaccattcggcgggacatccggcaggcgcgggagcggttcagtgggccacagctgcggcaggagctggctcgcctgcagcggagactggacagcgtggagctgctgagccccgacatcatcatgaacttgctgctctcctaccgcgatgtgcaggactactcggccatcattgagctggtggagacgctgcaggccttgcccacctgtgatgtggccgagcagcataatgtctgcttccactacacttttgccctcaaccggaggaacaggcctggggaccgggcgaaggccctgtctgtgctgctgccgctggtacagcttgagggctctgtggcgcccgatctgtactgcatgtgtggccgtatctacaaggacatgttcttcagctcgggtttccaggatgctgggcaccgggagcaggcctatcactggtatcgcaaggcttttgacgtagagcccagccttcactcaggcatcaatgcagctgtgctcctcattgctgccgggcagcactttgaggattccaaagagctccggctaataggcatgaagctgggctgcctgctggcccgcaaaggctgcgtggagaagatgcagtattactgggatgtgggtttctacctgggagcccagatcctcgccaatgaccccacccaggtggtgctggctgcagagcagctgtataagctcaatgcccccatatggtacctggtgtccgtgatggagaccttcctgctctaccagcacttcaggcccacgccagagccccctggagggccaccacgccgtgcccacttctggctccacttcttgctacagtcctgccaaccattcaagacagcctgtgcccagggcgaccagtgcttggtgctggtcctggagatgaacaaggtgctgctgcctgcaaagctcgaggttcggggtactgacccagtaagcacagtgaccctgagcctgctggagcctgagacccaggacattccctccagctggaccttcccagtcgcctccatatgcggagtcagcgcctcaaagcgcgacgagcgctgctgcttcctctatgcactccccccggctcaggacgtccagctgtgcttccccagcgtagggcactgccagtggttctgcggcctgatccaggcctgggtgacgaacccggattccacggcgcccgcggaggaggcggagggcgcgggggagatgttggagtttgattatgagtacacggagacgggcgagcggctggtgctgggcaagggcacgtatggggtggtgtacgcgggccgcgatcgccacacgagggtgcgcatcgccatcaaggagatcccggagcgggacagcaggttctctcagcccctgcatgaagagatcgctcttcacagacgcctgcgccacaagaacatagtgcgctatctgggctcagctagccagggcggctaccttaagatcttcatggaggaagtgcctggaggcagcctgtcctccttgctgcggtcggtgtggggacccctgaaggacaacgagagcaccatcagtttctacacccgccagatcctgcagggacttggctacttgcacgacaaccacatcgtgcacagggacataaaaggggacaatgtgctgatcaacaccttcagtgggctgctcaagatttctgacttcggcacctccaagcggctggcaggcatcacaccttgcactgagaccttcacaggaactctgcagtatatggccccagaaatcattgaccagggcccacgcgggtatgggaaagcagctgacatctggtcactgggctgcactgtcattgagatggccacaggtcgcccccccttccacgagctcgggagcccacaggctgccatgtttcaggtgggtatgtacaaggtccatccgccaatgcccagctctctgtcggccgaggcccaagcctttctcctccgaacttttgagccagacccccgcctccgagccagcgcccagacactgctgggggaccccttcctgcagcctgggaaaaggagccgcagccccagctccccacgacatgctccacggccctcagatgccccttctgccagtcccactccttcagccaactcaaccacccagtctcagacattcccgtgccctcaggcaccctctcagcacccacccagccccccgaagcgctgcctcagttatgggggcaccagccagctccgggtgcccgaggagcctgcggccgaggagcctgcgtctccggaggagagttcggggctgagcctgctgcaccaggagagcaagcgtcgggccatgctggccgcagtattggagcaggagctgccagcgctggcggagaatctgcaccaggagcagaagcaagagcagggggcccgtctgggcagaaaccatgtggaagagctgctgcgctgcctcggggcacacatccacactcccaaccgccggcagctcgcccaggagctgcgggcgctgcaaggacggctgagggcccagggccttgggcctgcgcttctgcacagaccgctgtttgccttcccggatgcggtgaagcagatcctccgcaagcgccagatccgtccacactggatgttcgttctggactcactgctcagccgtgctgtgcgggcagccctgggtgtgctaggaccggaggtggagaaggaggcggtctcaccgaggtcagaggagctgagtaatgaaggggactcccagcagagcccaggccagcagagcccgcttccggtggagcccgagcagggccccgctcctctgatggtgcagctgagcctcttgagggcagagactgatcggctgcgcgaaatcctggcggggaaggaacgggagtaccaggccctggtgcagcgggctctacagcggctgaatgaggaagcccggacctatgtcctggccccagagcctccaactgctctttcaacggaccagggcctggtgcagtggctacaggaactgaatgtggattcaggcaccatccaaatgctgttgaaccatagcttcaccctccacactctgctcacctatgccactcgagatgacctcatctacacccgcatcaggggagggatggtatgccgcatctggagggccatcttggcacagcgagcaggatccacaccagtcacctctggaccctgagagctgaatgagggcatcataggccagacaggcccaaggatggatgaatggagaggacaaaggcagcttctgacacaccagccccaggacctggggcgactggaggaagccaggcgagtggggcccaggactggttccagtgagagaaaccaaccacaggcacccaagcactaccagacaaagcgtattaaacagaacacttttgaacctttaaaaa

SEQ ID NO: 79 - DNA, 6695 bp, Homo sapiens
gccctcgccgcccgcggcgccccgagcgctttgtgagcagatgcggagccgagtggagggcgcgagccagatgcggggcgacagctgacttgctgagaggaggcggggaggcgcggagcgcgcgtgtggtccttgcgccgctgacttctccactggttcctgggcaccgaaagataaacctctcataatgaaggcccccgctgtgcttgcacctggcatcctcgtgctcctgtttaccttggtgcagaggagcaatggggagtgtaaagaggcactagcaaagtccgagatgaatgtgaatatgaagtatcagcttcccaacttcaccgcggaaacacccatccagaatgtcattctacatgagcatcacattttccttggtgccactaactacatttatgttttaaatgaggaagaccttcagaaggttgctgagtacaagactgggcctgtgctggaacacccagattgtttcccatgtcaggactgcagcagcaaagccaatttatcaggaggtgtttggaaagataacatcaacatggctctagttgtcgacacctactatgatgatcaactcattagctgtggcagcgtcaacagagggacctgccagcgacatgtctttccccacaatcatactgctgacatacagtcggaggttcactgcatattctccccacagatagaagagcccagccagtgtcctgactgtgtggtgagcgccctgggagccaaagtcctttcatctgtaaaggaccggttcatcaacttctttgtaggcaataccataaattcttcttatttcccagatcatccattgcattcgatatcagtgagaaggctaaaggaaacgaaagatggttttatgtttttgacggaccagtcctacattgatgttttacctgagttcagagattcttaccccattaagtatgtccatgcctttgaaagcaacaattttatttacttcttgacggtccaaagggaaactctagatgctcagacttttcacacaagaataatcaggttctgttccataaactctggattgcattcctacatggaaatgcctctggagtgtattctcacagaaaagagaaaaaagagatccacaaagaaggaagtgtttaatatacttcaggctgcgtatgtcagcaagcctggggcccagcttgctagacaaataggagccagcctgaatgatgacattcttttcggggtgttcgcacaaagcaagccagattctgccgaaccaatggatcgatctgccatgtgtgcattccctatcaaatatgtcaacgacttcttcaacaagatcgtcaacaaaaacaatgtgagatgtctccagcatttttacggacccaatcatgagcactgctttaataggacacttctgagaaattcatcaggctgtgaagcgcgccgtgatgaatatcgaacagagtttaccacagctttgcagcgcgttgacttattcatgggtcaattcagcgaagtcctcttaacatctatatccaccttcattaaaggagacctcaccatagctaatcttgggacatcagagggtcgcttcatgcaggttgtggtttctcgatcaggaccatcaacccctcatgtgaattttctcctggactcccatccagtgtctccagaagtgattgtggagcatacattaaaccaaaatggctacacactggttatcactgggaagaagatcacgaagatcccattgaatggcttgggctgcagacatttccagtcctgcagtcaatgcctctctgccccaccctttgttcagtgtggctggtgccacgacaaatgtgtgcgatcggaggaatgcctgagcgggacatggactcaacagatctgtctgcctgcaatctacaaggttttcccaaatagtgcaccccttgaaggagggacaaggctgaccatatgtggctgggactttggatttcggaggaataataaatttgatttaaagaaaactagagttctccttggaaatgagagctgcaccttgactttaagtgagagcacgatgaatacattgaaatgcacagttggtcctgccatgaataagcatttcaatatgtccataattatttcaaatggccacgggacaacacaatacagtacattctcctatgtggatcctgtaataacaagtatttcgccgaaatacggtcctatggctggtggcactttacttactttaactggaaattacctaaacagtgggaattctagacacatttcaattggtggaaaaacatgtactttaaaaagtgtgtcaaacagtattcttgaatgttataccccagcccaaaccatttcaactgagtttgctgttaaattgaaaattgacttagccaaccgagagacaagcatcttcagttaccgtgaagatcccattgtctatgaaattcatccaaccaaatcttttattagtacttggtggaaagaacctctcaacattgtcagttttctattttgctttgccagtggtgggagcacaataacaggtgttgggaaaaacctgaattcagttagtgtcccgagaatggtcataaatgtgcatgaagcaggaaggaactttacagtggcatgtcaacatcgctctaattcagagataatctgttgtaccactccttccctgcaacagctgaatctgcaactccccctgaaaaccaaagcctttttcatgttagatgggatcctttccaaatactttgatctcatttatgtacataatcctgtgtttaagccttttgaaaagccagtgatgatctcaatgggcaatgaaaatgtactggaaattaagggaaatgatattgaccctgaagcagttaaaggtgaagtgttaaaagttggaaataagagctgtgagaatatacacttacattctgaagccgttttatgcacggtccccaatgacctgctgaaattgaacagcgagctaaatatagagtggaagcaagcaatttcttcaaccgtccttggaaaagtaatagttcaaccagatcagaatttcacaggattgattgctggtgttgtctcaatatcaacagcactgttattactacttgggtttttcctgtggctgaaaaagagaaagcaaattaaagatctgggcagtgaattagttcgctacgatgcaagagtacacactcctcatttggataggcttgtaagtgcccgaagtgtaagcccaactacagaaatggtttcaaatgaatctgtagactaccgagctacttttccagaagatcagtttcctaattcatctcagaacggttcatgccgacaagtgcagtatcctctgacagacatgtcccccatcctaactagtggggactctgatatatccagtccattactgcaaaatactgtccacattgacctcagtgctctaaatccagagctggtccaggcagtgcagcatgtagtgattgggcccagtagcctgattgtgcatttcaatgaagtcataggaagagggcattttggttgtgtatatcatgggactttgttggacaatgatggcaagaaaattcactgtgctgtgaaatccttgaacagaatcactgacataggagaagtttcccaatttctgaccgagggaatcatcatgaaagattttagtcatcccaatgtcctctcgctcctgggaatctgcctgcgaagtgaagggtctccgctggtggtcctaccatacatgaaacatggagatcttcgaaatttcattcgaaatgagactcataatccaactgtaaaagatcttattggctttggtcttcaagtagccaaaggcatgaaatatcttgcaagcaaaaagtttgtccacagagacttggctgcaagaaactgtatgctggatgaaaaattcacagtcaaggttgctgattttggtcttgccagagacatgtatgataaagaatactatagtgtacacaacaaaacaggtgcaaagctgccagtgaagtggatggctttggaaagtctgcaaactcaaaagtttaccaccaagtcagatgtgtggtcctttggcgtgctcctctgggagctgatgacaagaggagccccaccttatcctgacgtaaacacctttgatataactgtttacttgttgcaagggagaagactcctacaacccgaatactgcccagaccccttatatgaagtaatgctaaaatgctggcaccctaaagccgaaatgcgcccatccttttctgaactggtgtcccggatatcagcgatcttctctactttcattggggagcactatgtccatgtgaacgctacttatgtgaacgtaaaatgtgtcgctccgtatccttctctgttgtcatcagaagataacgctgatgatgaggtggacacacgaccagcctccttctgggagacatcatagtgctagtactatgtcaaagcaacagtccacactttgtccaatggttttttcactgcctgacctttaaaaggccatcgatattctttgctcttgccaaaattgcactattataggacttgtattgttatttaaattactggattctaaggaatttcttatctgacagagcatcagaaccagaggcttggtcccacaggccacggaccaatggcctgcagccgtgacaacactcctgtcatattggagtccaaaacttgaattctgggttgaattttttaaaaatcaggtaccacttgatttcatatgggaaattgaagcaggaaatattgagggcttcttgatcacagaaaactcagaagagatagtaatgctcaggacaggagcggcagccccagaacaggccactcatttagaattctagtgtttcaaaacacttttgtgtgttgtatggtcaataacatttttcattactgatggtgtcattcacccattaggtaaacattcccttttaaatgtttgtttgttttttgagacaggatctcactctgttgccagggctgtagtgcagtggtgtgatcatagctcactgcaacctccacctcccaggctcaagcctcccgaatagctgggactacaggcgcacaccaccatccccggctaatttttgtattttttgtagagacggggttttgccatgttgccaaggctggtttcaaactcctggactcaagaaatccacccacctcagcctcccaaagtgctaggattacaggcatgagccactgcgcccagcccttataaatttttgtatagacattcctttggttggaagaatatttataggcaatacagtcaaagtttcaaaatagcatcacacaaaacatgtttataaatgaacaggatgtaatgtacatagatgacattaagaaaatttgtatgaaataatttagtcatcatgaaatatttagttgtcatataaaaacccactgtttgagaatgatgctactctgatctaatgaatgtgaacatgtagatgttttgtgtgtatttttttaaatgaaaactcaaaataagacaagtaatttgttgataaatatttttaaagataactcagcatgtttgtaaagcaggatacattttactaaaaggttcattggttccaatcacagctcataggtagagcaaagaaagggtggatggattgaaaagattagcctctgtctcggtggcaggttcccacctcgcaagcaattggaaacaaaacttttggggagttttattttgcattagggtgtgttttatgttaagcaaaacatactttagaaacaaatgaaaaaggcaattgaaaatcccagctatttcacctagatggaatagccaccctgagcagaactttgtgatgcttcattctgtggaattttgtgcttgctactgtatagtgcatgtggtgtaggttactctaactggttttgtcgacgtaaacatttaaagtgttatattttttataaaaatgtttatttttaatgatatgagaaaaattttgttaggccacaaaaacactgcactgtgaacattttagaaaaggtatgtcagactgggattaatgacagcatgattttcaatgactgtaaattgcgataaggaaatgtactgattgccaatacaccccaccctcattacatcatcaggacttgaagccaagggttaacccagcaagctacaaagagggtgtgtcacactgaaactcaatagttgagtttggctgttgttgcaggaaaatgattataactaaaagctctctgatagtgcagagacttaccagaagacacaaggaattgtactgaagagctattacaatccaaatattgccgtttcataaatgtaataagtaatactaattcacagagtattgtaaatggtggatgacaaaagaaaatctgctctgtggaaagaaagaactgtctctaccagggtcaagagcatgaacgcatcaatagaaagaactcggggaaacatcccatcaacaggactacacacttgtatatacattcttgagaacactgcaatgtgaaaatcacgtttgctatttataaacttgtccttagattaatgtgtctggacagattgtgggagtaagtgattcttctaagaattagatacttgtcactgcctatacctgcagctgaactgaatggtacttcgtatgttaatagttgttctgataaatcatgcaattaaagtaaagtgatgcaacatcttgtaaaaaaaaaaaaaaaaaaaa

SEQ ID NO: 80 - DNA, 9841 bp, Homo sapiens
tccggtcggcattttgttctgagagggagagacggaacgagagagagacacacacagggctccttccccccgccctcccccccctccctccgtcggtaccgactcacccgacaccaccaagccgcagggagggacgcccccgccgacaggagaattggttcccgggcccgcggcgatgcccccccggtagctcgggcccgtggtcgggtgtttgtgagtgtttctatgtgggagaaggaggaggaggaggaagaagaagcaacgatttgtcttctcggctggtctccccccggctctacatgttccccgcactgaggagacggaagaggagccgtagccaccccccctcccggcccggattatagtctctcgccacagcggcctcggcctccccttggattcagacgccgattcgcccagtgtttgggaaatgggaagtaatgacagctggcacctgaactaagtacttttataggcaacaccattccagaaattcaggatgaatggggatatgccccatgtccccattactactcttgcggggattgctagtctcacagacctcctgaaccagctgcctcttccatctcctttacctgctacaactacaaagagccttctctttaatgcacgaatagcagaagaggtgaactgccttttggcttgtagggatgacaatttggtttcacagcttgtccatagcctcaaccaggtatcaacagatcacatagagttgaaagataaccttggcagtgatgacccagaaggtgacataccagtcttgttgcaggccgtcctggcaaggagtcctaatgttttcagggagaaaagcatgcagaacagatatgtacaaagtggaatgatgatgtctcagtataaactttctcagaattccatgcacagtagtcctgcatcttccaattatcaacaaaccactatctcacatagcccctccagccggtttgtgccaccacagacaagctctgggaacagatttatgccacagcaaaatagcccagtgcctagtccatacgccccacaaagccctgcaggatacatgccatattcccatccttcaagttacacaacacatccacagatgcaacaagcatcggtatcaagtcccattgttgcaggtggtttgagaaacatacatgataataaagtttctggtccgttgtctggcaattcagctaatcatcatgctgataatcctagacatggttcaagtgaggactacctacacatggtgcacaggctaagtagtgacgatggagattcttcaacaatgaggaatgctgcatcttttcccttgagatctccacagccagtatgctcccctgctggaagtgaaggaactcctaaaggctcaagaccacctttaatcctacaatctcagtctctaccttgttcatcacctcgagatgttccaccagatatcttgctagattctccagaaagaaaacaaaagaagcagaagaaaatgaaattaggcaaggatgaaaaagagcagagtgagaaagcggcaatgtatgatataattagttctccatccaaggactctactaaacttacattaagactttctcgtgtaaggtcttcagacatggaccagcaagaggatatgatttctggtgtggaaaatagcaatgtttcagaaaatgatattccttttaatgtgcagtacccaggacagacttcaaaaacacccattactccacaagatataaaccgcccactaaatgctgctcaatgtttgtcgcagcaagaacaaacagcattccttccagcaaatcaagtgcctgttttacaacagaacacttcagttgctgcaaaacaaccccagacttctgtggtacagaatcaacaacagatatcacaacagggacctatatatgatgaagtggaattggatgcattggctgaaattgagcgaatagagagagaatcagctattgaaagggagcgcttctcaaaagaagttcaagataaagataagcctttgaaaaaaagaaaacaagattcttacccacaggaggctgggggtgctacaggaggtaatagaccagcttctcaggagacgggttctacgggaaatgggtcaaggccagcattaatggttagcattgatcttcatcaggcaggaagagtggactctcaggcttctataactcaggattcagactccataaaaaagcctgaagaaatcaaacaatgtaatgatgcacctgtttctgttcttcaggaagatattgttggaagtcttaaatctacaccagaaaaccatcctgagacacctaaaaaaaagtctgatcctgagctttcaaagagtgaaatgaaacaaagtgaaagtagattagcagaatctaaaccaaatgaaaaccgattggtggagacaaaatcaagtgaaaataagttagaaactaaagttgagacccaaacagaagaacttaaacagaatgagagcagaacaactgaatgcaaacaaaacgagagcaccatagttgagcctaaacaaaatgaaaatagactgtctgacacaaaaccaaatgacaacaaacaaaataatggcagatcagaaacaacaaaatcaaggcctgaaaccccaaagcaaaagggtgaaagccggcctgagactccaaaacaaaagagtgatgggcatcctgaaaccccaaaacagaagggtgatggaaggcctgaaactccaaagcaaaaaggtgagagccgccctgaaactccaaagcaaaaaaatgaagggcgacctgaaacaccaaaacacaggcatgacaataggagggattctggaaagccatctacagagaaaaaacctgaagtgtctaaacataaacaagatactaaatctgactcacctcggttaaaatcagaacgagctgaagccttaaagcagagacctgatgggcgatctgtttctgagtcactaagacgtgaccatgataataaacaaaaatcagatgacaggggtgaatcagagcgacatcgaggggatcagtctagggttcgaagaccagaaacattgagatcctctagtagaaatgaacatggcattaaatctgatagttcaaaaactgataaactagaacgaaaacacaggcatgaatcaggggactcaagggaaagaccatcttctggggaacaaaaatcaagacctgacagtcctcgtgttaaacaaggagattctaataaatcaagatctgataaacttggttttaaatcaccaactagtaaagatgacaaaaggacagagggtaacaagagtaaagtagacactaataaagcacaccctgacaataaggcagaatttccaagttatttgttggggggcaggtctggtgcgttgaaaaattttgtcattccgaaaatcaagagggataaagatggcaatgttactcaggagacaaagaaaatggaaatgaaaggagagccgaaagacaaagtagaaaaaataggattagttgaagatctaaataaaggagctaagcctgtagttgtgctacaaaaactgtctttggatgatgttcagaaacttattaaagatagagaggacaaatcaagaagttcccttaaacctatcaagaataaaccatcaaagtcaaataaaggtagtatagatcaatcagtgttaaaagaattaccccctgaactcctggcagaaattgagtccaccatgccactttgtgaacgtgtgaaaatgaacaaacgcaagcgtagcacagttaatgaaaagccaaaatatgctgaaatcagttcagatgaagataatgatagtgatgaagcttttgaatcctctaggaaacgacataaaaaagatgatgataaagcttgggaatatgaagagcgtgacagaagaagctctggggatcataggagaagtggccactctcatgaaggaagaaggagttcaggtggtggtcgttatcgaaaccgaagtccgtcagattctgacatggaagattattctcctcctcccagccttagtgaggttgctaggaaaatgaagaaaaaagaaaaacagaagaaaaggaaagcatatgaaccaaaactaacacctgaagaaatgatggactcttcaacttttaagagattcacagcctcaatagagaatattttggataatttggaagatatggattttactgcgtttggtgatgatgatgaaattcctcaggaactgctcttaggaaaacatcagcttaatgaacttggcagtgaatctgctaaaataaaagcaatgggtataatggataagctttcaactgacaaaactgtgaaagtcttaaatatcttggagaagaatattcaggatgggtcaaagctttccactttgttaaatcataataacgatactgaagaagaagaaaggttatggagagaccttattatggagagagttacaaaatcagcggatgcttgtcttacaactatcaacattatgacatcccctaacatgccaaaagctgtgtacattgaggatgtaattgaaagagttatacagtacactaaatttcatttgcagaatacactttatcctcagtatgatcctgtttacagattagatcctcatggaggaggcttattaagttcaaaagcaaaacgggctaaatgttctacccataagcagagagtaatagtaatgctttataacaaagtttgtgacattgttagcagcttatcagaattgctagagatacaacttcttacagacacaacaattcttcaggtttcatctatgggaataacaccattttttgtggaaaatgtcagtgaactacagttgtgtgccattaagttagtcactgcagtattctcaagatatgaaaaacataggcagttaattttggaagaaatttttacttcacttgcaagattaccaaccagcaagaggagtttaaggaacttcaggttaaacagtagtgatatggatggagaacctatgtatattcagatggttacagcactggttttacaacttattcagtgtgtggtacacttaccatcatcagagaaggactctaatgcagaagaagattcaaataaaaaaattgaccaggatgttgtcattactaactcttatgaaacagctatgcgaacagcccaaaacttcctctccatcttccttaaaaaatgtggtagtaagcaaggtgaagaagattacagaccactgtttgaaaattttgttcaagaccttctttcaacagtcaataagcctgaatggccagctgctgaactactccttagtttgttagggagactgttggttcatcagttcagtaacaagtcaacagagatggctttaagagtggcatctcttgattaccttggaactgttgctgcacggctaagaaaagatgctgttacaagcaaaatggatcaaggatctatagaacgcattttaaaacaggtttcaggaggggaagatgaaatccaacaattacaaaaagcattgcttgattacttggatgaaaacactgagactgatccttcactagtgttttctcgtaaattctatatagcccagtggtttcgagacacaactctggaaacagaaaaagcaatgaaatcacaaaaagatgaagaatcatctgaaggaacacatcatgcaaaggaaattgagacaactggccaaattatgcatcgagctgaaaaccgaaaaaagtttcttagaagcattatcaaaaccacaccttctcagtttagcacattaaagatgaactctgatactgtggactatgatgatgcttgcttgattgttcgatacttggcctccatgaggccgtttgcccagagctttgatatttatttgacacagatcctacgagttcttggtgaaaatgcaattgctgttcgaacaaaagccatgaagtgtttgtctgaggttgttgctgtagaccccagtattctagcaaggcttgatatgcaacgaggtgttcatggacgattgatggataattcgactagtgtccgagaagcagcagtagaattactaggtcgatttgtcctttgtcgacctcagcttgctgaacagtattatgatatgctgattgaaagaatattggatactggtatcagtgtcaggaaaagagtaataaagattctcagagacatttgtattgaacaaccaacatttccaaaaatcacagaaatgtgtgtaaaaatgattcgcagagtcaatgatgaagagggcattaagaaattagtaaatgaaacattccagaaactctggtttactccaactccacacaatgacaaagaagcaatgacaaggaaaattttaaacattaccgatgtggttgcagcatgcagagatactggatatgactggtttgagcaactgcttcaaaacttgttgaagtccgaagaggattcctcatataaacctgtgaagaaagcttgtactcaacttgttgataacctagttgagcacattcttaaatatgaggaatctctagctgactctgacaataaaggtgtgaattctggaagattggtagcttgcataaccactttgttcttattcagcaaaataagaccccagctcatggttaaacatgcaatgactatgcaaccataccttaccactaaatgtagtacgcaaaatgatttcatggttatctgcaatgttgcaaaaatcctagagctagttgtaccactgatggagcatccaagtgaaacttttcttgccactattgaggaagatctaatgaagctcatcatcaaatatggcatgactgtagtgcaacattgtgtgagctgtcttggagctgttgtaaataaagtgacacaaaattttaaatttgtgtgggcttgtttcaatagatactatggtgccatttcaaaattaaaaagtcaacaccaagaggacccaaataacacttcacttctaacaaacaaaccagcacttcttagatcccttttcaccgttggagcactatgtcggcattttgattttgatctggaagattttaaaggcaacagcaaggttaacataaaagataaagtacttgaactattgatgtattttacaaaacactcagatgaagaagtacaaacaaaagctatcattggtctaggatttgcctttattcagcatccaagtctaatgttcgagcaagaagtgaagaatctatataataatattttatctgataagaactcctcagtcaatttaaaaatacaagtgttaaaaaacctccagacctacctacaagaagaagatacacgtatgcagcaggcagatagagactggaagaaagttgcaaaacaggaagacttaaaagaaatgggtgatgtttcctcagggatgagtagttccatcatgcagctttatctcaaacaggtgcttgaggcattttttcacacccagtcaagtgtacgccactttgccctaaatgtcattgcattgactctaaatcaaggtcttattcatccagttcagtgtgtgccatatttaattgctatgggcacagacccagaacctgctatgcggaacaaggctgatcagcaacttgtggaaatagacaaaaaatatgctggattcattcatatgaaagcagtggctggtatgaagatgtcttaccaggtacaacaggcaatcaacacatgcctaaaagatcctgtaaggggtttcagacaagacgagtcctctagcgctttgtgttcacacctttactccatgatccgtggaaaccgccaacacagacgagcctttcttatttctttactcaacctctttgatgacacagcaaaaacagacgtgactatgctcttgtatatagcagacaatctagcctgttttccataccagacacaggaagagccgttgtttataatgcatcatatagacattacactctcagtttctggtagtaacctactgcagtcattcaaggagtctatggtaaaggacaaaaggaaagagagaaaatcatcacctagtaaggaaaatgagtcaagcgacagtgaagaagaagtttccaggcctcggaagtcacggaaacgtgtagattcagattcagattcagattcagaagacgatataaattcagtgatgaaatgtttgccagaaaattcagctcctttaatcgaatttgcaaatgtgtcccagggtattttattacttctcatgttaaaacaacatttgaagaatctttgtggattttctgatagtaaaattcagaagtactctccatctgaatctgcaaaagtatatgataaagcgataaaccgaaaaacaggagttcattttcatccaaaacaaacactggacttcctgcggagtgacatggctaattccaaaatcacagaagaggtgaaaaggagtatagtaaaacagtatctagatttcaaacttctcatggaacatctggaccctgatgaagaagaagaagaaggggaggtttcagctagcacaaatgctcggaacaaagcaattacctcactgcttggaggaggcagccctaaaaataatacagcagcagagacagaagatgatgaaagtgatggggaggatagaggaggaggcacttcagggtcattgagaaggtcaaaacgaaattcagactctacggagttggcagcacagatgaatgaaagtgttgacgtcatggatgtcatcgctatttgctgtccaaagtacaaagatcgaccacaaattgcaagagtagtgcagaaaaccagcagtggcttcagtgttcagtggatggcaggctcctacagtggctcctggactgaggctaagcgccgtgatggccgcaaactggtgccttgggtagacactattaaagagtcagacattatttacaaaaaaattgctctaacgagtgctaataagctgactaataaagttgttcagactttacgatccctgtatgccgccaaggatgggacttccagctaatgaatttgtacatgcagccaaatttacaggaatttttttaaaaggcagaaaaacttgaaataccaacattctggcaaaaaaaaatcagttttatgaagagtaagtggaacctgggatgcaggaacaaaagaaggaaatgttgggcaaacatttttgtgggagctcccttcgctgttgtgcagcagaaacagattctcagttcatttttactcccactgtattatagtttaacaaaaattgtttatatcttggaaaaaaaactttctgtttaaaaaaaataaacaagtgaatgttggaaattagtctgttaatgttcttaataaagtgttcttggagtttaacctagcagcggatggctttctttagcttagcccagtttccagggaagcattgttttttccaggctgtaaaatggcagaatctcctggatatataatttattctgttgaaaaaaaaaaaagcatgcagtatctatgacctatctgcagaaggagtttttgtaaatgtagattttgatgtattaggtcaccctgaaaacaatacaagaaaagggatccccaggtaatctggtggagcgaatactgcaataaatttttttacttctctttgttacttgtctgtttccatttgaatttcttattgtaaaaatctgtttaaatccatttatattattttacagtcttttatgtaaaatttattatatcactggttttcaaagcaaaacataaaatattgtttatacagtttgtataggctgacttctgaataattggtatctattattttcattcccataagagggtgtaaacaattaactccagggttttattgtatcctgcaatatttagtattaactatatatgatttagcactgtgccaaacacattttcaagagtacattttgatataaaaagaaactatagttta

SEQ ID NO: 81 - DNA, 7027 bp, Homo sapiens
caacgtgctgagctaatagcgacagatagagggcagacagattcctgctagcagcttagtgttagttgcttgtggtaactaaggcaggtggcatacatctcagaacgtggagaatgatggtatgctttctgagttaacatgttgaactgttttgcttttctaaaaattttcctagtaacattttcttgatgatatgagagtggatatcaatgcctcacagaaacaagaggtggaacatgtgaatgaatcgtcttggaactagattatgagcactggttctttttaaagggatgtgcaagaggcagccttggcaagaaaacttgctgcataatcttacatggactaaagatgaaactttaaaccgcaaatcagctttgagtgaactttgacagaagatgtttcgacagttttatctctggacatgtttagcttcagggatcatcctgggctctctctttgaaatctgcttgggccagtatgatgatgattgcaaactagctaggggaggaccaccagctaccatagttgctattgatgaagaaagtcggaatggtacaattctggtggacaacatgctgatcaaagggactgctggaggaccagaccccaccatagaactttctttaaaggataatgtggattactgggtgttgatggatcctgttaagcaaatgcttttcctgaacagcaccggaagagttctggatagagatccaccgatgaacatacactccattgtggtgcaggtccagtgcatcaacaaaaaagtgggcactattatctaccatgaagtgcgaatagtggtgagagacaggaatgacaactcacccactttcaagcatgaaagctactatgccacagtgaatgagctcactccagttggtaccacaatattcacaggattttcaggagacaatggagctacagatatagatgatggaccaaatggacagatagagtatgttattcagtataatccagatgatccgacatccaatgacacctttgaaattcccctaatgttgactggaaatatagtgttaaggaagaggctcaactatgaagataagactcgctactttgtcataatccaagctaatgaccgtgcccaaaatctgaatgagaggcgaaccaccaccaccactctcacagtggatgttctggatggagatgacttgggtccaatgtttcttccttgtgtccttgtgccaaacactcgtgattgccgtccactcacttatcaagctgccatacctgagttgagaactccggaagaactgaaccccattattgttacgccaccaatccaagccattgatcaggaccggaatattcaaccgccatcagataggccaggaatcctctattccatccttgttgggactcctgaggattacccacgatttttccatatgcatcctaggacagcagaacttagtctcctggagccagtaaacagagactttcaccagaaatttgatttggttattaaggctgaacaagacaatggtcatcctcttcctgcctttgccggtctacacattgaaatactggatgaaaacaatcaaagtccatattttacaatgcccagttatcaaggctatatcctggaatctgccccagtgggagcaaccatttcggacagtctcaatttgacttcacctttaagaatagtagctctggacaaggacatagaagatacaaaagacccagagcttcacctttttctgaatgactacacctcagtcttcaccgtcacacagactggtattactcgctacctcaccttacttcaaccagtggacagggaagaacagcaaacttacaccttttcgataacagcatttgatggtgtacaagaaagtgagccagtcatcgtcaatattcaagtgatggatgcaaatgataacacgccaaccttccctgaaatatcctatgatgtgtatgtttatacagacatgagacctggggacagtgtcatacagctcactgcagtcgacgcagacgaagggtcaaatggggagatcacatatgaaatccttgttggggctcagggagacttcatcatcaataaaacaacagggcttatcaccatcgctccaggggtggaaatgatagtcgggcggacttacgcactcacggtccaagcagcggataatgctcctcctgcagagcgaaggaactccatctgcactgtgtatattgaagtgcttccaccaaataatcaaagccctcctcgcttcccacagctgatgtatagccttgaaattagtgaagccatgagggttggtgctgttttattaaatctacaggcaactgatcgagagggagactcaataacatatgccattgagaatggagatcctcagagagtttttaatctttcagaaaccacggggattctaaccttagggaaagcactggacagggaaagcactgatcgctacattctgatcatcacagcttcagatggcaggccagatgggacctcaactgccacagtaaacatagtggtgacagatgtcaatgacaatgctccagtgtttgatccttatctgccaagaaatttatctgtggtggaagaagaagccaatgcctttgtgggtcaagtaaaagcaacagaccctgatgctggaataaatggtcaagtgcactacagtttgggtaactttaataatctttttcgtatcacatccaatgggagcatttacacagcagtgaagcttaacagagaagtcagggactactatgaacttgttgttgtggcaacagatggagcagtacaccctcgtcattcaactctaaccttggccatcaaggttttggacattgatgataacagtcctgtgttcaccaattcaacatacactgtccttgttgaagagaatttgccagctgggactaccatccttcaaatagaggccaaagatgtcgaccttggagcaaatgtgtcttaccggataagaagcccagaagtgaagcacttttttgcactacatccatttacaggagaactatcgcttttaaggagtttagattatgaggcatttccagaccaagaagcaagtatcacttttctggtagaggcctttgatatttatggaacaatgccacctggtattgctactgtcacagtgattgtaaaggatatgaatgattatcctcctgtctttagtaaacgaatatacaaagggatggtggctccggatgcagtcaagggtacacctatcacaacagtttatgctgaagatgcagaccctcctggattacctgcaagtcgtgtgaggtatagagtagatgatgtacagtttccttaccctgccagtatttttgaagtggaagaagattctggaagagtaataacacgagtcaatcttaatgaagaacctacaacaatttttaagttggtggtggttgcttttgatgatggggagcctgtgatgtccagcagtgccacagtgaagattcttgtcttacatcctggtgagatcccacgcttcacacaggaggaatatagacctcctccagtaagtgaacttgccaccaaagggaccatggttggtgtaatttctgctgctgccattaatcaaagtattgtgtactccattgtttcaggaaatgaagaagatacatttggaattaataacatcacaggtgttatctatgtgaatggacctctggattatgagaccaggacaagctatgtacttcgagtccaagctgattccctggaagtggtccttgccaatctccgagttccttcaaaaagcaatacagctaaagtatacattgagattcaggatgaaaataatcatcccccagtgtttcagaaaaaattctacatcggaggtgtatctgaagatgcaagaatgtttacttctgtactcagagtgaaggctactgataaagatactggcaattatagtgtcatggcctacagactcataataccaccaattaaagagggaaaagaaggatttgtagtggaaacatatacagggcttatcaaaactgctatgctcttccataatatgaggagatcctacttcaagtttcaagttattgcaactgacgactatgggaagggactgagcggcaaagccgatgtactcgtctccgtggtcaatcagctggatatgcaagtcattgtttccaatgtgcctcctactctagtggaaaaaaagatagaagatcttacagagatcttggatcgctatgttcaggaacaaattcctggtgccaaggtcgtagtggagtccattggagctcgccggcatggagatgccttttccctagaagattacaccaaatgtgacttgactgtctatgcaattgacccccaaaccaacagagccatcgatagaaatgagctttttaaatttttggatggcaaactacttgatatcaataaagactttcagccgtattatggggaaggaggacgcattctggagatccggactccagaggcagtgaccagcattaaaaagagaggagaaagtctaggatacacagaaggggccttgttggctctggccttcatcatcatcctctgctgcattcctgccatcttggtggttttggtcagctacagacagtttaaagtacgtcaagctgagtgtacaaagactgcacgaattcaggccgcattacccgcggctaaaccagcagtgccggctcctgcaccagtggcagcgcccccgccgccgccgccgcctccgccaggtgcgcatctctatgaagaacttggagacagctcaatgcataatcttttccttctctaccattttcaacaaagcaggggaaataactcagtctcagaagacaggaaacatcaacaagttgtgatgcccttttcttccaatactattgaggctcacaagtcagctcatgtagacggatcacttaagagcaacaaactgaagtctgcaagaaaattcacatttctatctgatgaggatgacttaagtgcccataatcccctttataaggaaaacataagtcaagtatcaacaaattcagacatttcacagagaacagattttgtagacccattttcacccaaaatacaagccaagagtaagtctctgaggggcccaagagaaaagattcagaggctgtggagtcagtcagtcagcttacccaggaggctgatgaggaaagttccaaatagaccagagatcatagatctgcagcagtggcaaggcaccaggcagaaagctgaaaatgaaaacactggaatctgtacaaacaaaagaggtagcagcaatccattgcttacaactgaagaggcaaatttgacagagaaagaggaaataaggcaaggtgaaacactgatgatagaaggaacagaacagttgaaatctctctcttcagactcttcattttgctttcccaggcctcacttctcattctccactttgccaactgtttcaagaactgtggaactcaaatcagaacctaatgtcatcagttctcctgctgagtgttccttggaactttctccttcaaggccttgtgttttacattcttcactctctaggagagagacacctatttgtatgttacctattgaaaccgaaagaaatatttttgaaaattttgcccatccaccaaacatctctccttctgcctgtccccttccccctcctcctcctatttctcctccttctcctcctcctgctcctgctcctcttgctcctcctcctgacatttctcctttttctcttttttgtcctcctccctctcctccttctatccctcttcctcttcctcctcctacattttttccactttccgtttcaacgtctggtcccccaacaccacctcttctacctccatttccaactcctcttcctccaccacctccttctattccttgccctccacctccttcagcttcatttctgtccacagagtgtgtctgtataacaggtgttaaatgcacgaccaacttgatgcctgccgagaaaattaagtcctctatgacacagctatcaacaacgacagtgtgtaaaacagaccctcagagagaaccaaaaggcatcctcagacacgttaaaaacttagcagaacttgaaaaatcagtagctaacatgtacagtcaaatagaaaaaaactatctacgcacaaatgtttcagaacttcaaactatgtgcccttcagaagtaacaaatatggaaatcacatctgaacaaaacaaggggagtttgaacaatattgtcgagggaactgaaaaacaatctcacagtcaatctacttcactgtaatgttgcttttcttattttagtcgggcaaacctcttgttgatcatagtcttcaagttgaacatcaaatttgaacgtcaaagaagactctattattttaccccaaattcaatgaaatgcagttttttttctcgtttttaatttaaaaagatattaacctcatcactactaactcactcatataatagatttaccttactttttaaaaactacaaagtagcataatttgttctacatttatttgaaaagtaagtaattttaatctcttttttagtgggaatatgtgggcatgaaaattagatacccaacttaaaccaaaggcatgtctatcatgtggatgcagtaacatttacatttagtttttgatcgtagttttatatgaatgttccaagaaaaaagcagactgttacaaataagttaaaactgatatgattgataggttctgttttttcttgaagcctatgtatttggtaagaagaaatactaccgaagtaaaatataatgtacctagattgtaggagatgacagacataaggtatttcaaaataaatctcaggtgctataacatgtagtcatctgttttctgataagaacatcttttactctgacttgcttttatcttagtagtatgcttatggatttagtagtatgcttatggatttgataaatcttatactttttcagttgctgtcttattctctttatttctcattgtgctttcccttcccttctttataatgaaaataaatcttgagtcgttg

SEQ ID NO: 82 - DNA, 6814 bp, Homo sapiens
caacgtgctgagctaatagcgacagatagagggcagacagattcctgctagcagcttagtgttagttgcttgtggtaactaaggcaggtggcatacatctcagaacgtggagaatgatggtatgctttctgagttaacatgttgaactgttttgcttttctaaaaattttcctagtaacattttcttgatgatatgagagtggatatcaatgcctcacagaaacaagaggtggaacatgtgaatgaatcgtcttggaactagattatgagcactggttctttttaaagggatgtgcaagaggcagccttggcaagaaaacttgctgcataatcttacatggactaaagatgaaactttaaaccgcaaatcagctttgagtgaactttgacagaagatgtttcgacagttttatctctggacatgtttagcttcagggatcatcctgggctctctctttgaaatctgcttgggccagtatgatgatgattgcaaactagctaggggaggaccaccagctaccatagttgctattgatgaagaaagtcggaatggtacaattctggtggacaacatgctgatcaaagggactgctggaggaccagaccccaccatagaactttctttaaaggataatgtggattactgggtgttgatggatcctgttaagcaaatgcttttcctgaacagcaccggaagagttctggatagagatccaccgatgaacatacactccattgtggtgcaggtccagtgcatcaacaaaaaagtgggcactattatctaccatgaagtgcgaatagtggtgagagacaggaatgacaactcacccactttcaagcatgaaagctactatgccacagtgaatgagctcactccagttggtaccacaatattcacaggattttcaggagacaatggagctacagatatagatgatggaccaaatggacagatagagtatgttattcagtataatccagatgatccgacatccaatgacacctttgaaattcccctaatgttgactggaaatatagtgttaaggaagaggctcaactatgaagataagactcgctactttgtcataatccaagctaatgaccgtgcccaaaatctgaatgagaggcgaaccaccaccaccactctcacagtggatgttctggatggagatgacttgggtccaatgtttcttccttgtgtccttgtgccaaacactcgtgattgccgtccactcacttatcaagctgccatacctgagttgagaactccggaagaactgaaccccattattgttacgccaccaatccaagccattgatcaggaccggaatattcaaccgccatcagataggccaggaatcctctattccatccttgttgggactcctgaggattacccacgatttttccatatgcatcctaggacagcagaacttagtctcctggagccagtaaacagagactttcaccagaaatttgatttggttattaaggctgaacaagacaatggtcatcctcttcctgcctttgccggtctacacattgaaatactggatgaaaacaatcaaagtccatattttacaatgcccagttatcaaggctatatcctggaatctgccccagtgggagcaaccatttcggacagtctcaatttgacttcacctttaagaatagtagctctggacaaggacatagaagatacaaaagacccagagcttcacctttttctgaatgactacacctcagtcttcaccgtcacacagactggtattactcgctacctcaccttacttcaaccagtggacagggaagaacagcaaacttacaccttttcgataacagcatttgatggtgtacaagaaagtgagccagtcatcgtcaatattcaagtgatggatgcaaatgataacacgccaaccttccctgaaatatcctatgatgtgtatgtttatacagacatgagacctggggacagtgtcatacagctcactgcagtcgacgcagacgaagggtcaaatggggagatcacatatgaaatccttgttggggctcagggagacttcatcatcaataaaacaacagggcttatcaccatcgctccaggggtggaaatgatagtcgggcggacttacgcactcacggtccaagcagcggataatgctcctcctgcagagcgaagcacggggattctaaccttagggaaagcactggacagggaaagcactgatcgctacattctgatcatcacagcttcagatggcaggccagatgggacctcaactgccacagtaaacatagtggtgacagatgtcaatgacaatgctccagtgtttgatccttatctgccaagaaatttatctgtggtggaagaagaagccaatgcctttgtgggtcaagtaaaagcaacagaccctgatgctggaataaatggtcaagtgcactacagtttgggtaactttaataatctttttcgtatcacatccaatgggagcatttacacagcagtgaagcttaacagagaagtcagggactactatgaacttgttgttgtggcaacagatggagcagtacaccctcgtcattcaactctaaccttggccatcaaggttttggacattgatgataacagtcctgtgttcaccaattcaacatacactgtccttgttgaagagaatttgccagctgggactaccatccttcaaatagaggccaaagatgtcgaccttggagcaaatgtgtcttaccggataagaagcccagaagtgaagcacttttttgcactacatccatttacaggagaactatcgcttttaaggagtttagattatgaggcatttccagaccaagaagcaagtatcacttttctggtagaggcctttgatatttatggaacaatgccacctggtattgctactgtcacagtgattgtaaaggatatgaatgattatcctcctgtctttagtaaacgaatatacaaagggatggtggctccggatgcagtcaagggtacacctatcacaacagtttatgctgaagatgcagaccctcctggattacctgcaagtcgtgtgaggtatagagtagatgatgtacagtttccttaccctgccagtatttttgaagtggaagaagattctggaagagtaataacacgagtcaatcttaatgaagaacctacaacaatttttaagttggtggtggttgcttttgatgatggggagcctgtgatgtccagcagtgccacagtgaagattcttgtcttacatcctggtgagatcccacgcttcacacaggaggaatatagacctcctccagtaagtgaacttgccaccaaagggaccatggttggtgtaatttctgctgctgccattaatcaaagtattgtgtactccattgtttcaggaaatgaagaagatacatttggaattaataacatcacaggtgttatctatgtgaatggacctctggattatgagaccaggacaagctatgtacttcgagtccaagctgattccctggaagtggtccttgccaatctccgagttccttcaaaaagcaatacagctaaagtatacattgagattcaggatgaaaataatcatcccccagtgtttcagaaaaaattctacatcggaggtgtatctgaagatgcaagaatgtttacttctgtactcagagtgaaggctactgataaagatactggcaattatagtgtcatggcctacagactcataataccaccaattaaagagggaaaagaaggatttgtagtggaaacatatacagggcttatcaaaactgctatgctcttccataatatgaggagatcctacttcaagtttcaagttattgcaactgacgactatgggaagggactgagcggcaaagccgatgtactcgtctccgtggtcaatcagctggatatgcaagtcattgtttccaatgtgcctcctactctagtggaaaaaaagatagaagatcttacagagatcttggatcgctatgttcaggaacaaattcctggtgccaaggtcgtagtggagtccattggagctcgccggcatggagatgccttttccctagaagattacaccaaatgtgacttgactgtctatgcaattgacccccaaaccaacagagccatcgatagaaatgagctttttaaatttttggatggcaaactacttgatatcaataaagactttcagccgtattatggggaaggaggacgcattctggagatccggactccagaggcagtgaccagcattaaaaagagaggagaaagtctaggatacacagaaggggccttgttggctctggccttcatcatcatcctctgctgcattcctgccatcttggtggttttggtcagctacagacagtttaaagtacgtcaagctgagtgtacaaagactgcacgaattcaggccgcattacccgcggctaaaccagcagtgccggctcctgcaccagtggcagcgcccccgccgccgccgccgcctccgccaggtgcgcatctctatgaagaacttggagacagctcaatgcataatcttttccttctctaccattttcaacaaagcaggggaaataactcagtctcagaagacaggaaacatcaacaagttgtgatgcccttttcttccaatactattgaggctcacaagtcagctcatgtagacggatcacttaagagcaacaaactgaagtctgcaagaaaattcacatttctatctgatgaggatgacttaagtgcccataatcccctttataaggaaaacataagtcaagtatcaacaaattcagacatttcacagagaacagattttgtagacccattttcacccaaaatacaagccaagagtaagtctctgaggggcccaagagaaaagattcagaggctgtggagtcagtcagtcagcttacccaggaggctgatgaggaaagttccaaatagaccagagatcatagatctgcagcagtggcaaggcaccaggcagaaagctgaaaatgaaaacactggaatctgtacaaacaaaagaggtagcagcaatccattgcttacaactgaagaggcaaatttgacagagaaagaggaaataaggcaaggtgaaacactgatgatagaaggaacagaacagttgaaatctctctcttcagactcttcattttgctttcccaggcctcacttctcattctccactttgccaactgtttcaagaactgtggaactcaaatcagaacctaatgtcatcagttctcctgctgagtgttccttggaactttctccttcaaggccttgtgttttacattcttcactctctaggagagagacacctatttgtatgttacctattgaaaccgaaagaaatatttttgaaaattttgcccatccaccaaacatctctccttctgcctgtccccttccccctcctcctcctatttctcctccttctcctcctcctgctcctgctcctcttgctcctcctcctgacatttctcctttttctcttttttgtcctcctccctctcctccttctatccctcttcctcttcctcctcctacattttttccactttccgtttcaacgtctggtcccccaacaccacctcttctacctccatttccaactcctcttcctccaccacctccttctattccttgccctccacctccttcagcttcatttctgtccacagagtgtgtctgtataacaggtgttaaatgcacgaccaacttgatgcctgccgagaaaattaagtcctctatgacacagctatcaacaacgacagtgtgtaaaacagaccctcagagagaaccaaaaggcatcctcagacacgttaaaaacttagcagaacttgaaaaatcagtagctaacatgtacagtcaaatagaaaaaaactatctacgcacaaatgtttcagaacttcaaactatgtgcccttcagaagtaacaaatatggaaatcacatctgaacaaaacaaggggagtttgaacaatattgtcgagggaactgaaaaacaatctcacagtcaatctacttcactgtaatgttgcttttcttattttagtcgggcaaacctcttgttgatcatagtcttcaagttgaacatcaaatttgaacgtcaaagaagactctattattttaccccaaattcaatgaaatgcagttttttttctcgtttttaatttaaaaagatattaacctcatcactactaactcactcatataatagatttaccttactttttaaaaactacaaagtagcataatttgttctacatttatttgaaaagtaagtaattttaatctcttttttagtgggaatatgtgggcatgaaaattagatacccaacttaaaccaaaggcatgtctatcatgtggatgcagtaacatttacatttagtttttgatcgtagttttatatgaatgttccaagaaaaaagcagactgttacaaataagttaaaactgatatgattgataggttctgttttttcttgaagcctatgtatttggtaagaagaaatactaccgaagtaaaatataatgtacctagattgtaggagatgacagacataaggtatttcaaaataaatctcaggtgctataacatgtagtcatctgttttctgataagaacatcttttactctgacttgcttttatcttagtagtatgcttatggatttagtagtatgcttatggatttgataaatcttatactttttcagttgctgtcttattctctttatttctcattgtgctttcccttcccttctttataatgaaaataaatcttgagtcgttg

SEQ ID NO: 83 - DNA, 7012 bp, Homo sapiens
caacgtgctgagctaatagcgacagatagagggcagacagattcctgctagcagcttagtgttagttgcttgtggtaactaaggcaggtggcatacatctcagaacgtggagaatgatggtatgctttctgagttaacatgttgaactgttttgcttttctaaaaattttcctagtaacattttcttgatgatatgagagtggatatcaatgcctcacagaaacaagaggtggaacatgtgaatgaatcgtcttggaactagattatgagcactggttctttttaaagggatgtgcaagaggcagccttggcaagaaaacttgctgcataatcttacatggactaaagatgaaactttaaaccgcaaatcagctttgagtgaactttgacagaagatgtttcgacagttttatctctggacatgtttagcttcagggatcatcctgggctctctctttgaaatctgcttgggccagtatgatgatgattgcaaactagctaggggaggaccaccagctaccatagttgctattgatgaagaaagtcggaatggtacaattctggtggacaacatgctgatcaaagggactgctggaggaccagaccccaccatagaactttctttaaaggataatgtggattactgggtgttgatggatcctgttaagcaaatgcttttcctgaacagcaccggaagagttctggatagagatccaccgatgaacatacactccattgtggtgcaggtccagtgcatcaacaaaaaagtgggcactattatctaccatgaagtgcgaatagtggtgagagacaggaatgacaactcacccactttcaagcatgaaagctactatgccacagtgaatgagctcactccagttggtaccacaatattcacaggattttcaggagacaatggagctacagatatagatgatggaccaaatggacagatagagtatgttattcagtataatccagatgatccgacatccaatgacacctttgaaattcccctaatgttgactggaaatatagtgttaaggaagaggctcaactatgaagataagactcgctactttgtcataatccaagctaatgaccgtgcccaaaatctgaatgagaggcgaaccaccaccaccactctcacagtggatgttctggatggagatgacttgggtccaatgtttcttccttgtgtccttgtgccaaacactcgtgattgccgtccactcacttatcaagctgccatacctgagttgagaactccggaagaactgaaccccattattgttacgccaccaatccaagccattgatcaggaccggaatattcaaccgccatcagataggccaggaatcctctattccatccttgttgggactcctgaggattacccacgatttttccatatgcatcctaggacagcagaacttagtctcctggagccagtaaacagagactttcaccagaaatttgatttggttattaaggctgaacaagacaatggtcatcctcttcctgcctttgccggtctacacattgaaatactggatgaaaacaatcaaagtccatattttacaatgcccagttatcaaggctatatcctggaatctgccccagtgggagcaaccatttcggacagtctcaatttgacttcacctttaagaatagtagctctggacaaggacatagaagatacaaaagacccagagcttcacctttttctgaatgactacacctcagtcttcaccgtcacacagactggtattactcgctacctcaccttacttcaaccagtggacagggaagaacagcaaacttacaccttttcgataacagcatttgatggtgtacaagaaagtgagccagtcatcgtcaatattcaagtgatggatgcaaatgataacacgccaaccttccctgaaatatcctatgatgtgtatgtttatacagacatgagacctggggacagtgtcatacagctcactgcagtcgacgcagacgaagggtcaaatggggagatcacatatgaaatccttgttggggctcagggagacttcatcatcaataaaacaacagggcttatcaccatcgctccaggggtggaaatgatagtcgggcggacttacgcactcacggtccaagcagcggataatgctcctcctgcagagcgaaggaactccatctgcactgtgtatattgaagtgcttccaccaaataatcaaagccctcctcgcttcccacagctgatgtatagccttgaaattagtgaagccatgagggttggtgctgttttattaaatctacaggcaactgatcgagagggagactcaataacatatgccattgagaatggagatcctcagagagtttttaatctttcagaaaccacggggattctaaccttagggaaagcactggacagggaaagcactgatcgctacattctgatcatcacagcttcagatggcaggccagatgggacctcaactgccacagtaaacatagtggtgacagatgtcaatgacaatgctccagtgtttgatccttatctgccaagaaatttatctgtggtggaagaagaagccaatgcctttgtgggtcaagtaaaagcaacagaccctgatgctggaataaatggtcaagtgcactacagtttgggtaactttaataatctttttcgtatcacatccaatgggagcatttacacagcagtgaagcttaacagagaagtcagggactactatgaacttgttgttgtggcaacagatggagcagtacaccctcgtcattcaactctaaccttggccatcaaggttttggacattgatgataacagtcctgtgttcaccaattcaacatacactgtccttgttgaagagaatttgccagctgggactaccatccttcaaatagaggccaaagatgtcgaccttggagcaaatgtgtcttaccggataagaagcccagaagtgaagcacttttttgcactacatccatttacaggagaactatcgcttttaaggagtttagattatgaggcatttccagaccaagaagcaagtatcacttttctggtagaggcctttgatatttatggaacaatgccacctggtattgctactgtcacagtgattgtaaaggatatgaatgattatcctcctgtctttagtaaacgaatatacaaagggatggtggctccggatgcagtcaagggtacacctatcacaacagtttatgctgaagatgcagaccctcctggattacctgcaagtcgtgtgaggtatagagtagatgatgtacagtttccttaccctgccagtatttttgaagtggaagaagattctggaagagtaataacacgagtcaatcttaatgaagaacctacaacaatttttaagttggtggtggttgcttttgatgatggggagcctgtgatgtccagcagtgccacagtgaagattcttgtcttacatcctggtgagatcccacgcttcacacaggaggaatatagacctcctccagtaagtgaacttgccaccaaagggaccatggttggtgtaatttctgctgctgccattaatcaaagtattgtgtactccattgtttcaggaaatgaagaagatacatttggaattaataacatcacaggtgttatctatgtgaatggacctctggattatgagaccaggacaagctatgtacttcgagtccaagctgattccctggaagtggtccttgccaatctccgagttccttcaaaaagcaatacagctaaagtatacattgagattcaggatgaaaataatcatcccccagtgtttcagaaaaaattctacatcggaggtgtatctgaagatgcaagaatgtttacttctgtactcagagtgaaggctactgataaagatactggcaattatagtgtcatggcctacagactcataataccaccaattaaagagggaaaagaaggatttgtagtggaaacatatacagggcttatcaaaactgctatgctcttccataatatgaggagatcctacttcaagtttcaagttattgcaactgacgactatgggaagggactgagcggcaaagccgatgtactcgtctccgtggtcaatcagctggatatgcaagtcattgtttccaatgtgcctcctactctagtggaaaaaaagatagaagatcttacagagatcttggatcgctatgttcaggaacaaattcctggtgccaaggtcgtagtggagtccattggagctcgccggcatggagatgccttttccctagaagattacaccaaatgtgacttgactgtctatgcaattgacccccaaaccaacagagccatcgatagaaatgagctttttaaatttttggatggcaaactacttgatatcaataaagactttcagccgtattatggggaaggaggacgcattctggagatccggactccagaggcagtgaccagcattaaaaagagaggagaaagtctaggatacacagaaggggccttgttggctctggccttcatcatcatcctctgctgcattcctgccatcttggtggttttggtcagctacagacaacgtcaagctgagtgtacaaagactgcacgaattcaggccgcattacccgcggctaaaccagcagtgccggctcctgcaccagtggcagcgcccccgccgccgccgccgcctccgccaggtgcgcatctctatgaagaacttggagacagctcaattcttttccttctctaccattttcaacaaagcaggggaaataactcagtctcagaagacaggaaacatcaacaagttgtgatgcccttttcttccaatactattgaggctcacaagtcagctcatgtagacggatcacttaagagcaacaaactgaagtctgcaagaaaattcacatttctatctgatgaggatgacttaagtgcccataatcccctttataaggaaaacataagtcaagtatcaacaaattcagacatttcacagagaacagattttgtagacccattttcacccaaaatacaagccaagagtaagtctctgaggggcccaagagaaaagattcagaggctgtggagtcagtcagtcagcttacccaggaggctgatgaggaaagttccaaatagaccagagatcatagatctgcagcagtggcaaggcaccaggcagaaagctgaaaatgaaaacactggaatctgtacaaacaaaagaggtagcagcaatccattgcttacaactgaagaggcaaatttgacagagaaagaggaaataaggcaaggtgaaacactgatgatagaaggaacagaacagttgaaatctctctcttcagactcttcattttgctttcccaggcctcacttctcattctccactttgccaactgtttcaagaactgtggaactcaaatcagaacctaatgtcatcagttctcctgctgagtgttccttggaactttctccttcaaggccttgtgttttacattcttcactctctaggagagagacacctatttgtatgttacctattgaaaccgaaagaaatatttttgaaaattttgcccatccaccaaacatctctccttctgcctgtccccttccccctcctcctcctatttctcctccttctcctcctcctgctcctgctcctcttgctcctcctcctgacatttctcctttttctcttttttgtcctcctccctctcctccttctatccctcttcctcttcctcctcctacattttttccactttccgtttcaacgtctggtcccccaacaccacctcttctacctccatttccaactcctcttcctccaccacctccttctattccttgccctccacctccttcagcttcatttctgtccacagagtgtgtctgtataacaggtgttaaatgcacgaccaacttgatgcctgccgagaaaattaagtcctctatgacacagctatcaacaacgacagtgtgtaaaacagaccctcagagagaaccaaaaggcatcctcagacacgttaaaaacttagcagaacttgaaaaatcagtagctaacatgtacagtcaaatagaaaaaaactatctacgcacaaatgtttcagaacttcaaactatgtgcccttcagaagtaacaaatatggaaatcacatctgaacaaaacaaggggagtttgaacaatattgtcgagggaactgaaaaacaatctcacagtcaatctacttcactgtaatgttgcttttcttattttagtcgggcaaacctcttgttgatcatagtcttcaagttgaacatcaaatttgaacgtcaaagaagactctattattttaccccaaattcaatgaaatgcagttttttttctcgtttttaatttaaaaagatattaacctcatcactactaactcactcatataatagatttaccttactttttaaaaactacaaagtagcataatttgttctacatttatttgaaaagtaagtaattttaatctcttttttagtgggaatatgtgggcatgaaaattagatacccaacttaaaccaaaggcatgtctatcatgtggatgcagtaacatttacatttagtttttgatcgtagttttatatgaatgttccaagaaaaaagcagactgttacaaataagttaaaactgatatgattgataggttctgttttttcttgaagcctatgtatttggtaagaagaaatactaccgaagtaaaatataatgtacctagattgtaggagatgacagacataaggtatttcaaaataaatctcaggtgctataacatgtagtcatctgttttctgataagaacatcttttactctgacttgcttttatcttagtagtatgcttatggatttagtagtatgcttatggatttgataaatcttatactttttcagttgctgtcttattctctttatttctcattgtgctttcccttcccttctttataatgaaaataaatcttgagtcgttg

SEQ ID NO: 84 - DNA, 6901 bp, Homo sapiens
caacgtgctgagctaatagcgacagatagagggcagacagattcctgctagcagcttagtgttagttgcttgtggtaactaaggcaggtggcatacatctcagaacgtggagaatgatggtatgctttctgagttaacatgttgaactgttttgcttttctaaaaattttcctagtaacattttcttgatgatatgagagtggatatcaatgcctcacagaaacaagaggtggaacatgtgaatgaatcgtcttggaactagattatgagcactggttctttttaaagggatgtgcaagaggcagccttggcaagaaaacttgctgcataatcttacatggactaaagatgaaactttaaaccgcaaatcagctttgagtgaactttgacagaagatgtttcgacagttttatctctggacatgtttagcttcagggatcatcctgggctctctctttgaaatctgcttgggccagtatgatgatgattgcaaactagctaggggaggaccaccagctaccatagttgctattgatgaagaaagtcggaatggtacaattctggtggacaacatgctgatcaaagggactgctggaggaccagaccccaccatagaactttctttaaaggataatgtggattactgggtgttgatggatcctgttaagcaaatgcttttcctgaacagcaccggaagagttctggatagagatccaccgatgaacatacactccattgtggtgcaggtccagtgcatcaacaaaaaagtgggcactattatctaccatgaagtgcgaatagtggtgagagacaggaatgacaactcacccactttcaagcatgaaagctactatgccacagtgaatgagctcactccagttggtaccacaatattcacaggattttcaggagacaatggagctacagatatagatgatggaccaaatggacagatagagtatgttattcagtataatccagatgatccggaccgtgcccaaaatctgaatgagaggcgaaccaccaccaccactctcacagtggatgttctggatggagatgacttgggtccaatgtttcttccttgtgtccttgtgccaaacactcgtgattgccgtccactcacttatcaagctgccatacctgagttgagaactccggaagaactgaaccccattattgttacgccaccaatccaagccattgatcaggaccggaatattcaaccgccatcagataggccaggaatcctctattccatccttgttgggactcctgaggattacccacgatttttccatatgcatcctaggacagcagaacttagtctcctggagccagtaaacagagactttcaccagaaatttgatttggttattaaggctgaacaagacaatggtcatcctcttcctgcctttgccggtctacacattgaaatactggatgaaaacaatcaaagtccatattttacaatgcccagttatcaaggctatatcctggaatctgccccagtgggagcaaccatttcggacagtctcaatttgacttcacctttaagaatagtagctctggacaaggacatagaagatacaaaagacccagagcttcacctttttctgaatgactacacctcagtcttcaccgtcacacagactggtattactcgctacctcaccttacttcaaccagtggacagggaagaacagcaaacttacaccttttcgataacagcatttgatggtgtacaagaaagtgagccagtcatcgtcaatattcaagtgatggatgcaaatgataacacgccaaccttccctgaaatatcctatgatgtgtatgtttatacagacatgagacctggggacagtgtcatacagctcactgcagtcgacgcagacgaagggtcaaatggggagatcacatatgaaatccttgttggggctcagggagacttcatcatcaataaaacaacagggcttatcaccatcgctccaggggtggaaatgatagtcgggcggacttacgcactcacggtccaagcagcggataatgctcctcctgcagagcgaaggaactccatctgcactgtgtatattgaagtgcttccaccaaataatcaaagccctcctcgcttcccacagctgatgtatagccttgaaattagtgaagccatgagggttggtgctgttttattaaatctacaggcaactgatcgagagggagactcaataacatatgccattgagaatggagatcctcagagagtttttaatctttcagaaaccacggggattctaaccttagggaaagcactggacagggaaagcactgatcgctacattctgatcatcacagcttcagatggcaggccagatgggacctcaactgccacagtaaacatagtggtgacagatgtcaatgacaatgctccagtgtttgatccttatctgccaagaaatttatctgtggtggaagaagaagccaatgcctttgtgggtcaagtaaaagcaacagaccctgatgctggaataaatggtcaagtgcactacagtttgggtaactttaataatctttttcgtatcacatccaatgggagcatttacacagcagtgaagcttaacagagaagtcagggactactatgaacttgttgttgtggcaacagatggagcagtacaccctcgtcattcaactctaaccttggccatcaaggttttggacattgatgataacagtcctgtgttcaccaattcaacatacactgtccttgttgaagagaatttgccagctgggactaccatccttcaaatagaggccaaagatgtcgaccttggagcaaatgtgtcttaccggataagaagcccagaagtgaagcacttttttgcactacatccatttacaggagaactatcgcttttaaggagtttagattatgaggcatttccagaccaagaagcaagtatcacttttctggtagaggcctttgatatttatggaacaatgccacctggtattgctactgtcacagtgattgtaaaggatatgaatgattatcctcctgtctttagtaaacgaatatacaaagggatggtggctccggatgcagtcaagggtacacctatcacaacagtttatgctgaagatgcagaccctcctggattacctgcaagtcgtgtgaggtatagagtagatgatgtacagtttccttaccctgccagtatttttgaagtggaagaagattctggaagagtaataacacgagtcaatcttaatgaagaacctacaacaatttttaagttggtggtggttgcttttgatgatggggagcctgtgatgtccagcagtgccacagtgaagattcttgtcttacatcctggtgagatcccacgcttcacacaggaggaatatagacctcctccagtaagtgaacttgccaccaaagggaccatggttggtgtaatttctgctgctgccattaatcaaagtattgtgtactccattgtttcaggaaatgaagaagatacatttggaattaataacatcacaggtgttatctatgtgaatggacctctggattatgagaccaggacaagctatgtacttcgagtccaagctgattccctggaagtggtccttgccaatctccgagttccttcaaaaagcaatacagctaaagtatacattgagattcaggatgaaaataatcatcccccagtgtttcagaaaaaattctacatcggaggtgtatctgaagatgcaagaatgtttacttctgtactcagagtgaaggctactgataaagatactggcaattatagtgtcatggcctacagactcataataccaccaattaaagagggaaaagaaggatttgtagtggaaacatatacagggcttatcaaaactgctatgctcttccataatatgaggagatcctacttcaagtttcaagttattgcaactgacgactatgggaagggactgagcggcaaagccgatgtactcgtctccgtggtcaatcagctggatatgcaagtcattgtttccaatgtgcctcctactctagtggaaaaaaagatagaagatcttacagagatcttggatcgctatgttcaggaacaaattcctggtgccaaggtcgtagtggagtccattggagctcgccggcatggagatgccttttccctagaagattacaccaaatgtgacttgactgtctatgcaattgacccccaaaccaacagagccatcgatagaaatgagctttttaaatttttggatggcaaactacttgatatcaataaagactttcagccgtattatggggaaggaggacgcattctggagatccggactccagaggcagtgaccagcattaaaaagagaggagaaagtctaggatacacagaaggggccttgttggctctggccttcatcatcatcctctgctgcattcctgccatcttggtggttttggtcagctacagacaacgtcaagctgagtgtacaaagactgcacgaattcaggccgcattacccgcggctaaaccagcagtgccggctcctgcaccagtggcagcgcccccgccgccgccgccgcctccgccaggtgcgcatctctatgaagaacttggagacagctcaattcttttccttctctaccattttcaacaaagcaggggaaataactcagtctcagaagacaggaaacatcaacaagttgtgatgcccttttcttccaatactattgaggctcacaagtcagctcatgtagacggatcacttaagagcaacaaactgaagtctgcaagaaaattcacatttctatctgatgaggatgacttaagtgcccataatcccctttataaggaaaacataagtcaagtatcaacaaattcagacatttcacagagaacagattttgtagacccattttcacccaaaatacaagccaagagtaagtctctgaggggcccaagagaaaagattcagaggctgtggagtcagtcagtcagcttacccaggaggctgatgaggaaagttccaaatagaccagagatcatagatctgcagcagtggcaaggcaccaggcagaaagctgaaaatgaaaacactggaatctgtacaaacaaaagaggtagcagcaatccattgcttacaactgaagaggcaaatttgacagagaaagaggaaataaggcaaggtgaaacactgatgatagaaggaacagaacagttgaaatctctctcttcagactcttcattttgctttcccaggcctcacttctcattctccactttgccaactgtttcaagaactgtggaactcaaatcagaacctaatgtcatcagttctcctgctgagtgttccttggaactttctccttcaaggccttgtgttttacattcttcactctctaggagagagacacctatttgtatgttacctattgaaaccgaaagaaatatttttgaaaattttgcccatccaccaaacatctctccttctgcctgtccccttccccctcctcctcctatttctcctccttctcctcctcctgctcctgctcctcttgctcctcctcctgacatttctcctttttctcttttttgtcctcctccctctcctccttctatccctcttcctcttcctcctcctacattttttccactttccgtttcaacgtctggtcccccaacaccacctcttctacctccatttccaactcctcttcctccaccacctccttctattccttgccctccacctccttcagcttcatttctgtccacagagtgtgtctgtataacaggtgttaaatgcacgaccaacttgatgcctgccgagaaaattaagtcctctatgacacagctatcaacaacgacagtgtgtaaaacagaccctcagagagaaccaaaaggcatcctcagacacgttaaaaacttagcagaacttgaaaaatcagtagctaacatgtacagtcaaatagaaaaaaactatctacgcacaaatgtttcagaacttcaaactatgtgcccttcagaagtaacaaatatggaaatcacatctgaacaaaacaaggggagtttgaacaatattgtcgagggaactgaaaaacaatctcacagtcaatctacttcactgtaatgttgcttttcttattttagtcgggcaaacctcttgttgatcatagtcttcaagttgaacatcaaatttgaacgtcaaagaagactctattattttaccccaaattcaatgaaatgcagttttttttctcgtttttaatttaaaaagatattaacctcatcactactaactcactcatataatagatttaccttactttttaaaaactacaaagtagcataatttgttctacatttatttgaaaagtaagtaattttaatctcttttttagtgggaatatgtgggcatgaaaattagatacccaacttaaaccaaaggcatgtctatcatgtggatgcagtaacatttacatttagtttttgatcgtagttttatatgaatgttccaagaaaaaagcagactgttacaaataagttaaaactgatatgattgataggttctgttttttcttgaagcctatgtatttggtaagaagaaatactaccgaagtaaaatataatgtacctagattgtaggagatgacagacataaggtatttcaaaataaatctcaggtgctataacatgtagtcatctgttttctgataagaacatcttttactctgacttgcttttatcttagtagtatgcttatggatttagtagtatgcttatggatttgataaatcttatactttttcagttgctgtcttattctctttatttctcattgtgctttcccttcccttctttataatgaaaataaatcttgagtcgttg

SEQ ID NO: 85 - DNA, 6961 bp, Homo sapiens
caacgtgctgagctaatagcgacagatagagggcagacagattcctgctagcagcttagtgttagttgcttgtggtaactaaggcaggtggcatacatctcagaacgtggagaatgatggtatgctttctgagttaacatgttgaactgttttgcttttctaaaaattttcctagtaacattttcttgatgatatgagagtggatatcaatgcctcacagaaacaagaggtggaacatgtgaatgaatcgtcttggaactagattatgagcactggttctttttaaagggatgtgcaagaggcagccttggcaagaaaacttgctgcataatcttacatggactaaagatgaaactttaaaccgcaaatcagctttgagtgaactttgacagaagatgtttcgacagttttatctctggacatgtttagcttcagggatcatcctgggctctctctttgaaatctgcttgggccagtatgatgatggtacaattctggtggacaacatgctgatcaaagggactgctggaggaccagaccccaccatagaactttctttaaaggataatgtggattactgggtgttgatggatcctgttaagcaaatgcttttcctgaacagcaccggaagagttctggatagagatccaccgatgaacatacactccattgtggtgcaggtccagtgcatcaacaaaaaagtgggcactattatctaccatgaagtgcgaatagtggtgagagacaggaatgacaactcacccactttcaagcatgaaagctactatgccacagtgaatgagctcactccagttggtaccacaatattcacaggattttcaggagacaatggagctacagatatagatgatggaccaaatggacagatagagtatgttattcagtataatccagatgatccgacatccaatgacacctttgaaattcccctaatgttgactggaaatatagtgttaaggaagaggctcaactatgaagataagactcgctactttgtcataatccaagctaatgaccgtgcccaaaatctgaatgagaggcgaaccaccaccaccactctcacagtggatgttctggatggagatgacttgggtccaatgtttcttccttgtgtccttgtgccaaacactcgtgattgccgtccactcacttatcaagctgccatacctgagttgagaactccggaagaactgaaccccattattgttacgccaccaatccaagccattgatcaggaccggaatattcaaccgccatcagataggccaggaatcctctattccatccttgttgggactcctgaggattacccacgatttttccatatgcatcctaggacagcagaacttagtctcctggagccagtaaacagagactttcaccagaaatttgatttggttattaaggctgaacaagacaatggtcatcctcttcctgcctttgccggtctacacattgaaatactggatgaaaacaatcaaagtccatattttacaatgcccagttatcaaggctatatcctggaatctgccccagtgggagcaaccatttcggacagtctcaatttgacttcacctttaagaatagtagctctggacaaggacatagaagatacaaaagacccagagcttcacctttttctgaatgactacacctcagtcttcaccgtcacacagactggtattactcgctacctcaccttacttcaaccagtggacagggaagaacagcaaacttacaccttttcgataacagcatttgatggtgtacaagaaagtgagccagtcatcgtcaatattcaagtgatggatgcaaatgataacacgccaaccttccctgaaatatcctatgatgtgtatgtttatacagacatgagacctggggacagtgtcatacagctcactgcagtcgacgcagacgaagggtcaaatggggagatcacatatgaaatccttgttggggctcagggagacttcatcatcaataaaacaacagggcttatcaccatcgctccaggggtggaaatgatagtcgggcggacttacgcactcacggtccaagcagcggataatgctcctcctgcagagcgaaggaactccatctgcactgtgtatattgaagtgcttccaccaaataatcaaagccctcctcgcttcccacagctgatgtatagccttgaaattagtgaagccatgagggttggtgctgttttattaaatctacaggcaactgatcgagagggagactcaataacatatgccattgagaatggagatcctcagagagtttttaatctttcagaaaccacggggattctaaccttagggaaagcactggacagggaaagcactgatcgctacattctgatcatcacagcttcagatggcaggccagatgggacctcaactgccacagtaaacatagtggtgacagatgtcaatgacaatgctccagtgtttgatccttatctgccaagaaatttatctgtggtggaagaagaagccaatgcctttgtgggtcaagtaaaagcaacagaccctgatgctggaataaatggtcaagtgcactacagtttgggtaactttaataatctttttcgtatcacatccaatgggagcatttacacagcagtgaagcttaacagagaagtcagggactactatgaacttgttgttgtggcaacagatggagcagtacaccctcgtcattcaactctaaccttggccatcaaggttttggacattgatgataacagtcctgtgttcaccaattcaacatacactgtccttgttgaagagaatttgccagctgggactaccatccttcaaatagaggccaaagatgtcgaccttggagcaaatgtgtcttaccggataagaagcccagaagtgaagcacttttttgcactacatccatttacaggagaactatcgcttttaaggagtttagattatgaggcatttccagaccaagaagcaagtatcacttttctggtagaggcctttgatatttatggaacaatgccacctggtattgctactgtcacagtgattgtaaaggatatgaatgattatcctcctgtctttagtaaacgaatatacaaagggatggtggctccggatgcagtcaagggtacacctatcacaacagtttatgctgaagatgcagaccctcctggattacctgcaagtcgtgtgaggtatagagtagatgatgtacagtttccttaccctgccagtatttttgaagtggaagaagattctggaagagtaataacacgagtcaatcttaatgaagaacctacaacaatttttaagttggtggtggttgcttttgatgatggggagcctgtgatgtccagcagtgccacagtgaagattcttgtcttacatcctggtgagatcccacgcttcacacaggaggaatatagacctcctccagtaagtgaacttgccaccaaagggaccatggttggtgtaatttctgctgctgccattaatcaaagtattgtgtactccattgtttcaggaaatgaagaagatacatttggaattaataacatcacaggtgttatctatgtgaatggacctctggattatgagaccaggacaagctatgtacttcgagtccaagctgattccctggaagtggtccttgccaatctccgagttccttcaaaaagcaatacagctaaagtatacattgagattcaggatgaaaataatcatcccccagtgtttcagaaaaaattctacatcggaggtgtatctgaagatgcaagaatgtttacttctgtactcagagtgaaggctactgataaagatactggcaattatagtgtcatggcctacagactcataataccaccaattaaagagggaaaagaaggatttgtagtggaaacatatacagggcttatcaaaactgctatgctcttccataatatgaggagatcctacttcaagtttcaagttattgcaactgacgactatgggaagggactgagcggcaaagccgatgtactcgtctccgtggtcaatcagctggatatgcaagtcattgtttccaatgtgcctcctactctagtggaaaaaaagatagaagatcttacagagatcttggatcgctatgttcaggaacaaattcctggtgccaaggtcgtagtggagtccattggagctcgccggcatggagatgccttttccctagaagattacaccaaatgtgacttgactgtctatgcaattgacccccaaaccaacagagccatcgatagaaatgagctttttaaatttttggatggcaaactacttgatatcaataaagactttcagccgtattatggggaaggaggacgcattctggagatccggactccagaggcagtgaccagcattaaaaagagaggagaaagtctaggatacacagaaggggccttgttggctctggccttcatcatcatcctctgctgcattcctgccatcttggtggttttggtcagctacagacagtttaaagtacgtcaagctgagtgtacaaagactgcacgaattcaggccgcattacccgcggctaaaccagcagtgccggctcctgcaccagtggcagcgcccccgccgccgccgccgcctccgccaggtgcgcatctctatgaagaacttggagacagctcaatgcataatcttttccttctctaccattttcaacaaagcaggggaaataactcagtctcagaagacaggaaacatcaacaagttgtgatgcccttttcttccaatactattgaggctcacaagtcagctcatgtagacggatcacttaagagcaacaaactgaagtctgcaagaaaattcacatttctatctgatgaggatgacttaagtgcccataatcccctttataaggaaaacataagtcaagtatcaacaaattcagacatttcacagagaacagattttgtagacccattttcacccaaaatacaagccaagagtaagtctctgaggggcccaagagaaaagattcagaggctgtggagtcagtcagtcagcttacccaggaggctgatgaggaaagttccaaatagaccagagatcatagatctgcagcagtggcaaggcaccaggcagaaagctgaaaatgaaaacactggaatctgtacaaacaaaagaggtagcagcaatccattgcttacaactgaagaggcaaatttgacagagaaagaggaaataaggcaaggtgaaacactgatgatagaaggaacagaacagttgaaatctctctcttcagactcttcattttgctttcccaggcctcacttctcattctccactttgccaactgtttcaagaactgtggaactcaaatcagaacctaatgtcatcagttctcctgctgagtgttccttggaactttctccttcaaggccttgtgttttacattcttcactctctaggagagagacacctatttgtatgttacctattgaaaccgaaagaaatatttttgaaaattttgcccatccaccaaacatctctccttctgcctgtccccttccccctcctcctcctatttctcctccttctcctcctcctgctcctgctcctcttgctcctcctcctgacatttctcctttttctcttttttgtcctcctccctctcctccttctatccctcttcctcttcctcctcctacattttttccactttccgtttcaacgtctggtcccccaacaccacctcttctacctccatttccaactcctcttcctccaccacctccttctattccttgccctccacctccttcagcttcatttctgtccacagagtgtgtctgtataacaggtgttaaatgcacgaccaacttgatgcctgccgagaaaattaagtcctctatgacacagctatcaacaacgacagtgtgtaaaacagaccctcagagagaaccaaaaggcatcctcagacacgttaaaaacttagcagaacttgaaaaatcagtagctaacatgtacagtcaaatagaaaaaaactatctacgcacaaatgtttcagaacttcaaactatgtgcccttcagaagtaacaaatatggaaatcacatctgaacaaaacaaggggagtttgaacaatattgtcgagggaactgaaaaacaatctcacagtcaatctacttcactgtaatgttgcttttcttattttagtcgggcaaacctcttgttgatcatagtcttcaagttgaacatcaaatttgaacgtcaaagaagactctattattttaccccaaattcaatgaaatgcagttttttttctcgtttttaatttaaaaagatattaacctcatcactactaactcactcatataatagatttaccttactttttaaaaactacaaagtagcataatttgttctacatttatttgaaaagtaagtaattttaatctcttttttagtgggaatatgtgggcatgaaaattagatacccaacttaaaccaaaggcatgtctatcatgtggatgcagtaacatttacatttagtttttgatcgtagttttatatgaatgttccaagaaaaaagcagactgttacaaataagttaaaactgatatgattgataggttctgttttttcttgaagcctatgtatttggtaagaagaaatactaccgaagtaaaatataatgtacctagattgtaggagatgacagacataaggtatttcaaaataaatctcaggtgctataacatgtagtcatctgttttctgataagaacatcttttactctgacttgcttttatcttagtagtatgcttatggatttagtagtatgcttatggatttgataaatcttatactttttcagttgctgtcttattctctttatttctcattgtgctttcccttcccttctttataatgaaaataaatcttgagtcgttg

SEQ ID NO: 86 - DNA, 5768 bp, Homo sapiens
caacgtgctgagctaatagcgacagatagagggcagacagattcctgctagcagcttagtgttagttgcttgtggtaactaaggcaggtggcatacatctcagaacgtggagaatgatggtatgctttctgagttaacatgttgaactgttttgcttttctaaaaattttcctagtaacattttcttgatgatatgagagtggatatcaatgcctcacagaaacaagaggtggaacatgtgaatgaatcgtcttggaactagattatgagcactggttctttttaaagggatgtgcaagaggcagccttggcaagaaaacttgctgcataatcttacatggactaaagatgaaactttaaaccgcaaatcagctttgagtgaactttgacagaagatgtttcgacagttttatctctggacatgtttagcttcagggatcatcctgggctctctctttgaaatctgcttgggccagtatgatgatgactggcaatatgaggattgcaaactagctaggggaggaccaccagctaccatagttgctattgatgaagaaagtcggaatggtacaattctggtggacaacatgctgatcaaagggactgctggaggaccagaccccaccatagaactttctttaaaggataatgtggattactgggtgttgatggatcctgttaagcaaatgcttttcctgaacagcaccggaagagttctggatagagatccaccgatgaacatacactccattgtggtgcaggtccagtgcatcaacaaaaaagtgggcactattatctaccatgaagtgcgaatagtggtgagagacaggaatgacaactcacccactttcaagcatgaaagctactatgccacagtgaatgagctcactccagttggtaccacaatattcacaggattttcaggagacaatggagctacagatatagatgatggaccaaatggacagatagagtatgttattcagtataatccagatgatccgacatccaatgacacctttgaaattcccctaatgttgactggaaatatagtgttaaggaagaggctcaactatgaagataagactcgctactttgtcataatccaagctaatgaccgtgcccaaaatctgaatgagaggcgaaccaccaccaccactctcacagtggatgttctggatggagatgacttgggtccaatgtttcttccttgtgtccttgtgccaaacactcgtgattgccgtccactcacttatcaagctgccatacctgagttgagaactccggaagaactgaaccccattattgttacgccaccaatccaagccattgatcaggaccggaatattcaaccgccatcagataggccaggaatcctctattccatccttgttgggactcctgaggattacccacgatttttccatatgcatcctaggacagcagaacttagtctcctggagccagtaaacagagactttcaccagaaatttgatttggttattaaggctgaacaagacaatggtcatcctcttcctgcctttgccggtctacacattgaaatactggatgaaaacaatcaaagtccatattttacaatgcccagttatcaaggctatatcctggaatctgccccagtgggagcaaccatttcggacagtctcaatttgacttcacctttaagaatagtagctctggacaaggacatagaagatgttccacccagtggagttcctacaaaagacccagagcttcacctttttctgaatgactacacctcagtcttcaccgtcacacagactggtattactcgctacctcaccttacttcaaccagtggacagggaagaacagcaaacttacaccttttcgataacagcatttgatggtgtacaagaaagtgagccagtcatcgtcaatattcaagtgatggatgcaaatgataacacgccaaccttccctgaaatatcctatgatgtgtatgtttatacagacatgagacctggggacagtgtcatacagctcactgcagtcgacgcagacgaagggtcaaatggggagatcacatatgaaatccttgttggggctcagggagacttcatcatcaataaaacaacagggcttatcaccatcgctccaggggtggaaatgatagtcgggcggacttacgcactcacggtccaagcagcggataatgctcctcctgcagagcgaaggaactccatctgcactgtgtatattgaagtgcttccaccaaataatcaaagccctcctcgcttcccacagctgatgtatagccttgaaattagtgaagccatgagggttggtgctgttttattaaatctacaggcaactgatcgagagggagactcaataacatatgccattgagaatggagatcctcagagagtttttaatctttcagaaaccacggggattctaaccttagggaaagcactggacagggaaagcactgatcgctacattctgatcatcacagcttcagatggcaggccagatgggacctcaactgccacagtaaacatagtggtgacagatgtcaatgacaatgctccagtgtttgatccttatctgccaagaaatttatctgtggtggaagaagaagccaatgcctttgtgggtcaagtaaaagcaacagaccctgatgctggaataaatggtcaagtgcactacagtttgggtaactttaataatctttttcgtatcacatccaatgggagcatttacacagcagtgaagcttaacagagaagtcagggactactatgaacttgttgttgtggcaacagatggagcagtacaccctcgtcattcaactctaaccttggccatcaaggttttggacattgatgataacagtcctgtgttcaccaattcaacatacactgtccttgttgaagagaatttgccagctgggactaccatccttcaaatagaggccaaagatgtcgaccttggagcaaatgtgtcttaccggataagaagcccagaagtgaagcacttttttgcactacatccatttacaggagaactatcgcttttaaggagtttagattatgaggcatttccagaccaagaagcaagtatcacttttctggtagaggcctttgatatttatggaacaatgccacctggtattgctactgtcacagtgattgtaaaggatatgaatgattatcctcctgtctttagtaaacgaatatacaaagggatggtggctccggatgcagtcaagggtacacctatcacaacagtttatgctgaagatgcagaccctcctggattacctgcaagtcgtgtgaggtatagagtagatgatgtacagtttccttaccctgccagtatttttgaagtggaagaagattctggaagagtaataacacgagtcaatcttaatgaagaacctacaacaatttttaagttggtggtggttgcttttgatgatggggagcctgtgatgtccagcagtgccacagtgaagattcttgtcttacatcctggtgagatcccacgcttcacacaggaggaatatagacctcctccagtaagtgaacttgccaccaaagggaccatggttggtgtaatttctgctgctgccattaatcaaagtattgtgtactccattgtttcaggaaatgaagaagatacatttggaattaataacatcacaggtgttatctatgtgaatggacctctggattatgagaccaggacaagctatgtacttcgagtccaagctgattccctggaagtggtccttgccaatctccgagttccttcaaaaagcaatacagctaaagtatacattgagattcaggatgaaaataatcatcccccagtgtttcagaaaaaattctacatcggaggtgtatctgaagatgcaagaatgtttacttctgtactcagagtgaaggctactgataaagatactggcaattatagtgtcatggcctacagactcataataccaccaattaaagagggaaaagaaggatttgtagtggaaacatatacagggcttatcaaaactgctatgctcttccataatatgaggagatcctacttcaagtttcaagttattgcaactgacgactatgggaagggactgagcggcaaagccgatgtactcgtctccgtggtcaatcagctggatatgcaagtcattgtttccaatgtgcctcctactctagtggaaaaaaagatagaagatcttacagagatcttggatcgctatgttcaggaacaaattcctggtgccaaggtcgtagtggagtccattggagctcgccggcatggagatgccttttccctagaagattacaccaaatgtgacttgactgtctatgcaattgacccccaaaccaacagagccatcgatagaaatgagctttttaaatttttggatggcaaactacttgatatcaataaagactttcagccgtattatggggaaggaggacgcattctggagatccggactccagaggcagtgaccagcattaaaaagagaggagaaagtctaggatacacagaaggggccttgttggctctggccttcatcatcatcctctgctgcattcctgccatcttggtggttttggtcagctacagacagtttaaagtacgtcaagctgagtgtacaaagactgcacgaattcaggccgcattacccgcggctaaaccagcagtgccggctcctgcaccagtggcagcgcccccgccgccgccgccgcctccgccaggtgcgcatctctatgaagaacttggagacagctcaatgcataagtatgaaatgcctcaatatgggagtcgccgtcgattgttaccaccagctggacaggaggaatatggtgaggtggttggtgaagctgaggaagaatatgaggaggaagaggaagagccaaagaaaattaaaaaaccaaaggttgaaattagagagcctagtgaggaggaagaagtagttgtaactatcgaaaaaccaccagcagctgagcctacatacacaacatggaagagagccagaatattccccatgatttttaagaaagttagaggattagctgataaaagaggaatcgttgaccttgagggtgaagagtggcagagacgccttgaggaagaagataaagattatttgaaactcactctggaccaagaggaagcaacagaaagcactgtagaatcagaggaggaatcctccagcgactatactgaatacagtgaagaagagtctgagttcagtgagtctgagactacagaagaggaatctgagtcagagacaccctctgaggaggaggagagttccacccctgaatcagaagaatcggaatccacagagtcagaaggagaaaaagcaaggaaaaacattgtgcttgcaagaagaaggcccatggttgaggaggtcaaggaagtcaagggtaggaaagaggagccacaagaagaacaaaaagaacctaagatggaagaagaagaacactcagaagaagaagaaagtggaccagcccctgtggaagaaagtacagaccctgaagctcaagatatccctgaagagggcagtgcagaatcagcttcggtggaaggaggtgtggaaagtgaggaggaatcagaatcaggtagtagtagcagtagtagcgaaagtcagtctggaggtccatggggctatcaggtaccagcgtatgacagaagcaagaatgcaaaccaaaagaagtcgccaggagcaaactctgaaggttacaacacagcactttga

SEQ ID NO: 87 - DNA, 5803 bp, Homo sapiens
caacgtgctgagctaatagcgacagatagagggcagacagattcctgctagcagcttagtgttagttgcttgtggtaactaaggcaggtggcatacatctcagaacgtggagaatgatggtatgctttctgagttaacatgttgaactgttttgcttttctaaaaattttcctagtaacattttcttgatgatatgagagtggatatcaatgcctcacagaaacaagaggtggaacatgtgaatgaatcgtcttggaactagattatgagcactggttctttttaaagggatgtgcaagaggcagccttggcaagaaaacttgctgcataatcttacatggactaaagatgaaactttaaaccgcaaatcagctttgagtgaactttgacagaagatgtttcgacagttttatctctggacatgtttagcttcagggatcatcctgggctctctctttgaaatctgcttgggccagtatgatgatgattgcaaactagctaggggaggaccaccagctaccatagttgctattgatgaagaaagtcggaatggtacaattctggtggacaacatgctgatcaaagggactgctggaggaccagaccccaccatagaactttctttaaaggataatgtggattactgggtgttgatggatcctgttaagcaaatgcttttcctgaacagcaccggaagagttctggatagagatccaccgatgaacatacactccattgtggtgcaggtccagtgcatcaacaaaaaagtgggcactattatctaccatgaagtgcgaatagtggtgagagacaggaatgacaactcacccactttcaagcatgaaagctactatgccacagtgaatgagctcactccagttggtaccacaatattcacaggattttcaggagacaatggagctacagatatagatgatggaccaaatggacagatagagtatgttattcagtataatccagatgatccgacatccaatgacacctttgaaattcccctaatgttgactggaaatatagtgttaaggaagaggctcaactatgaagataagactcgctactttgtcataatccaagctaatgaccgtgcccaaaatctgaatgagaggcgaaccaccaccaccactctcacagtggatgttctggatggagatgacttgggtccaatgtttcttccttgtgtccttgtgccaaacactcgtgattgccgtccactcacttatcaagctgccatacctgagttgagaactccggaagaactgaaccccattattgttacgccaccaatccaagccattgatcaggaccggaatattcaaccgccatcagataggccaggaatcctctattccatccttgttgggactcctgaggattacccacgatttttccatatgcatcctaggacagcagaacttagtctcctggagccagtaaacagagactttcaccagaaatttgatttggttattaaggctgaacaagacaatggtcatcctcttcctgcctttgccggtctacacattgaaatactggatgaaaacaatcaaagtccatattttacaatgcccagttatcaaggctatatcctggaatctgccccagtgggagcaaccatttcggacagtctcaatttgacttcacctttaagaatagtagctctggacaaggacatagaagatacaaaagacccagagcttcacctttttctgaatgactacacctcagtcttcaccgtcacacagactggtattactcgctacctcaccttacttcaaccagtggacagggaagaacagcaaacttacaccttttcgataacagcatttgatggtgtacaagaaagtgagccagtcatcgtcaatattcaagtgatggatgcaaatgataacacgccaaccttccctgaaatatcctatgatgtgtatgtttatacagacatgagacctggggacagtgtcatacagctcactgcagtcgacgcagacgaagggtcaaatggggagatcacatatgaaatccttgttggggctcagggagacttcatcatcaataaaacaacagggcttatcaccatcgctccaggggtggaaatgatagtcgggcggacttacgcactcacggtccaagcagcggataatgctcctcctgcagagcgaaggaactccatctgcactgtgtatattgaagtgcttccaccaaataatcaaagccctcctcgcttcccacagctgatgtatagccttgaaattagtgaagccatgagggttggtgctgttttattaaatctacaggcaactgatcgagagggagactcaataacatatgccattgagaatggagatcctcagagagtttttaatctttcagaaaccacggggattctaaccttagggaaagcactggacagggaaagcactgatcgctacattctgatcatcacagcttcagatggcaggccagatgggacctcaactgccacagtaaacatagtggtgacagatgtcaatgacaatgctccagtgtttgatccttatctgccaagaaatttatctgtggtggaagaagaagccaatgcctttgtgggtcaagtaaaagcaacagaccctgatgctggaataaatggtcaagtgcactacagtttgggtaactttaataatctttttcgtatcacatccaatgggagcatttacacagcagtgaagcttaacagagaagtcagggactactatgaacttgttgttgtggcaacagatggagcagtacaccctcgtcattcaactctaaccttggccatcaaggttttggacattgatgataacagtcctgtgttcaccaattcaacatacactgtccttgttgaagagaatttgccagctgggactaccatccttcaaatagaggccaaagatgtcgaccttggagcaaatgtgtcttaccggataagaagcccagaagtgaagcacttttttgcactacatccatttacaggagaactatcgcttttaaggagtttagattatgaggcatttccagaccaagaagcaagtatcacttttctggtagaggcctttgatatttatggaacaatgccacctggtattgctactgtcacagtgattgtaaaggatatgaatgattatcctcctgtctttagtaaacgaatatacaaagggatggtggctccggatgcagtcaagggtacacctatcacaacagtttatgctgaagatgcagaccctcctggattacctgcaagtcgtgtgaggtatagagtagatgatgtacagtttccttaccctgccagtatttttgaagtggaagaagattctggaagagtaataacacgagtcaatcttaatgaagaacctacaacaatttttaagttggtggtggttgcttttgatgatggggagcctgtgatgtccagcagtgccacagtgaagattcttgtcttacatcctggtgagatcccacgcttcacacaggaggaatatagacctcctccagtaagtgaacttgccaccaaagggaccatggttggtgtaatttctgctgctgccattaatcaaagtattgtgtactccattgtttcaggaaatgaagaagatacatttggaattaataacatcacaggtgttatctatgtgaatggacctctggattatgagaccaggacaagctatgtacttcgagtccaagctgattccctggaagtggtccttgccaatctccgagttccttcaaaaagcaatacagctaaagtatacattgagattcaggatgaaaataatcatcccccagtgtttcagaaaaaattctacatcggaggtgtatctgaagatgcaagaatgtttacttctgtactcagagtgaaggctactgataaagatactggcaattatagtgtcatggcctacagactcataataccaccaattaaagagggaaaagaaggatttgtagtggaaacatatacagggcttatcaaaactgctatgctcttccataatatgaggagatcctacttcaagtttcaagttattgcaactgacgactatgggaagggactgagcggcaaagccgatgtactcgtctccgtggtcaatcagctggatatgcaagtcattgtttccaatgtgcctcctactctagtggaaaaaaagatagaagatcttacagagatcttggatcgctatgttcaggaacaaattcctggtgccaaggtcgtagtggagtccattggagctcgccggcatggagatgccttttccctagaagattacaccaaatgtgacttgactgtctatgcaattgacccccaaaccaacagagccatcgatagaaatgagctttttaaatttttggatggcaaactacttgatatcaataaagactttcagccgtattatggggaaggaggacgcattctggagatccggactccagaggcagtgaccagcattaaaaagagaggagaaagtctaggatacacagaaggggccttgttggctctggccttcatcatcatcctctgctgcattcctgccatcttggtggttttggtcagctacagacagtttaaagtacgtcaagctgagtgtacaaagactgcacgaattcaggccgcattacccgcggctaaaccagcagtgccggctcctgcaccagtggcagcgcccccgccgccgccgccgcctccgccaggtgcgcatctctatgaagaacttggagacagctcaatgcataagaattatccatggagtctggaattgatcctggccaggaatatggacaagattattacagttatgagcatgggtatgaaatgcctcaatatgggagtcgccgtcgattgttaccaccagctggacaggaggaatatggtgaggtggttggtgaagctgaggaagaatatgaggaggaagaggaagagccaaagaaaattaaaaaaccaaaggttgaaattagagagcctagtgaggaggaagaagtagttgtaactatcgaaaaaccaccagcagctgagcctacatacacaacatggaagagagccagaatattccccatgatttttaagaaagttagaggattagctgataaaagaggaatcgttgaccttgagggtgaagagtggcagagacgccttgaggaagaagataaagattatttgaaactcactctggaccaagaggaagcaacagaaagcactgtagaatcagaggaggaatcctccagcgactatactgaatacagtgaagaagagtctgagttcagtgagtctgagactacagaagaggaatctgagtcagagacaccctctgaggaggaggagagttccacccctgaatcagaagaatcggaatccacagagtcagaaggagaaaaagcaaggaaaaacattgtgcttgcaagaagaaggcccatggttgaggaggtcaaggaagtcaagggtaggaaagaggagccacaagaagaacaaaaagaacctaagatggaagaagaagaacactcagaagaagaagaaagtggaccagcccctgtggaagaaagtacagaccctgaagctcaagatatccctgaagagggcagtgcagaatcagcttcggtggaaggaggtgtggaaagtgaggaggaatcagaatcaggtagtagtagcagtagtagcgaaagtcagtctggaggtccatggggctatcaggtaccagcgtatgacagaagcaagaatgcaaaccaaaagaagtcgccaggagcaaactctgaaggttacaacacagcactttga

SEQ ID NO: 88 - DNA, 9252 bp, Homo sapiens
caacgtgctgagctaatagcgacagatagagggcagacagattcctgctagcagcttagtgttagttgcttgtggtaactaaggcaggtggcatacatctcagaacgtggagaatgatggtatgctttctgagttaacatgttgaactgttttgcttttctaaaaattttcctagtaacattttcttgatgatatgagagtggatatcaatgcctcacagaaacaagaggtggaacatgtgaatgaatcgtcttggaactagattatgagcactggttctttttaaagggatgtgcaagaggcagccttggcaagaaaacttgctgcataatcttacatggactaaagatgaaactttaaaccgcaaatcagctttgagtgaactttgacagaagatgtttcgacagttttatctctggacatgtttagcttcagggatcatcctgggctctctctttgaaatctgcttgggccagtatgatgatgactggcaatatgaggattgcaaactagctaggggaggaccaccagctaccatagttgctattgatgaagaaagtcggaatggtacaattctggtggacaacatgctgatcaaagggactgctggaggaccagaccccaccatagaactttctttaaaggataatgtggattactgggtgttgatggatcctgttaagcaaatgcttttcctgaacagcaccggaagagttctggatagagatccaccgatgaacatacactccattgtggtgcaggtccagtgcatcaacaaaaaagtgggcactattatctaccatgaagtgcgaatagtggtgagagacaggaatgacaactcacccactttcaagcatgaaagctactatgccacagtgaatgagctcactccagttggtaccacaatattcacaggattttcaggagacaatggagctacagatatagatgatggaccaaatggacagatagagtatgttattcagtataatccagatgatccgacatccaatgacacctttgaaattcccctaatgttgactggaaatatagtgttaaggaagaggctcaactatgaagataagactcgctactttgtcataatccaagctaatgaccgtgcccaaaatctgaatgagaggcgaaccaccaccaccactctcacagtggatgttctggatggagatgacttgggtccaatgtttcttccttgtgtccttgtgccaaacactcgtgattgccgtccactcacttatcaagctgccatacctgagttgagaactccggaagaactgaaccccattattgttacgccaccaatccaagccattgatcaggaccggaatattcaaccgccatcagataggccaggaatcctctattccatccttgttgggactcctgaggattacccacgatttttccatatgcatcctaggacagcagaacttagtctcctggagccagtaaacagagactttcaccagaaatttgatttggttattaaggctgaacaagacaatggtcatcctcttcctgcctttgccggtctacacattgaaatactggatgaaaacaatcaaagtccatattttacaatgcccagttatcaaggctatatcctggaatctgccccagtgggagcaaccatttcggacagtctcaatttgacttcacctttaagaatagtagctctggacaaggacatagaagatacaaaagacccagagcttcacctttttctgaatgactacacctcagtcttcaccgtcacacagactggtattactcgctacctcaccttacttcaaccagtggacagggaagaacagcaaacttacaccttttcgataacagcatttgatggtgtacaagaaagtgagccagtcatcgtcaatattcaagtgatggatgcaaatgataacacgccaaccttccctgaaatatcctatgatgtgtatgtttatacagacatgagacctggggacagtgtcatacagctcactgcagtcgacgcagacgaagggtcaaatggggagatcacatatgaaatccttgttggggctcagggagacttcatcatcaataaaacaacagggcttatcaccatcgctccaggggtggaaatgatagtcgggcggacttacgcactcacggtccaagcagcggataatgctcctcctgcagagcgaaggaactccatctgcactgtgtatattgaagtgcttccaccaaataatcaaagccctcctcgcttcccacagctgatgtatagccttgaaattagtgaagccatgagggttggtgctgttttattaaatctacaggcaactgatcgagagggagactcaataacatatgccattgagaatggagatcctcagagagtttttaatctttcagaaaccacggggattctaaccttagggaaagcactggacagggaaagcactgatcgctacattctgatcatcacagcttcagatggcaggccagatgggacctcaactgccacagtaaacatagtggtgacagatgtcaatgacaatgctccagtgtttgatccttatctgccaagaaatttatctgtggtggaagaagaagccaatgcctttgtgggtcaagtaaaagcaacagaccctgatgctggaataaatggtcaagtgcactacagtttgggtaactttaataatctttttcgtatcacatccaatgggagcatttacacagcagtgaagcttaacagagaagtcagggactactatgaacttgttgttgtggcaacagatggagcagtacaccctcgtcattcaactctaaccttggccatcaaggttttggacattgatgataacagtcctgtgttcaccaattcaacatacactgtccttgttgaagagaatttgccagctgggactaccatccttcaaatagaggccaaagatgtcgaccttggagcaaatgtgtcttaccggataagaagcccagaagtgaagcacttttttgcactacatccatttacaggagaactatcgcttttaaggagtttagattatgaggcatttccagaccaagaagcaagtatcacttttctggtagaggcctttgatatttatggaacaatgccacctggtattgctactgtcacagtgattgtaaaggatatgaatgattatcctcctgtctttagtaaacgaatatacaaagggatggtggctccggatgcagtcaagggtacacctatcacaacagtttatgctgaagatgcagaccctcctggattacctgcaagtcgtgtgaggtatagagtagatgatgtacagtttccttaccctgccagtatttttgaagtggaagaagattctggaagagtaataacacgagtcaatcttaatgaagaacctacaacaatttttaagttggtggtggttgcttttgatgatggggagcctgtgatgtccagcagtgccacagtgaagattcttgtcttacatcctggtgagatcccacgcttcacacaggaggaatatagacctcctccagtaagtgaacttgccaccaaagggaccatggttggtgtaatttctgctgctgccattaatcaaagtattgtgtactccattgtttcaggaaatgaagaagatacatttggaattaataacatcacaggtgttatctatgtgaatggacctctggattatgagaccaggacaagctatgtacttcgagtccaagctgattccctggaagtggtccttgccaatctccgagttccttcaaaaagcaatacagctaaagtatacattgagattcaggatgaaaataatcatcccccagtgtttcagaaaaaattctacatcggaggtgtatctgaagatgcaagaatgtttacttctgtactcagagtgaaggctactgataaagatactggcaattatagtgtcatggcctacagactcataataccaccaattaaagagggaaaagaaggatttgtagtggaaacatatacagggcttatcaaaactgctatgctcttccataatatgaggagatcctacttcaagtttcaagttattgcaactgacgactatgggaagggactgagcggcaaagccgatgtactcgtctccgtggtcaatcagctggatatgcaagtcattgtttccaatgtgcctcctactctagtggaaaaaaagatagaagatcttacagagatcttggatcgctatgttcaggaacaaattcctggtgccaaggtcgtagtggagtccattggagctcgccggcatggagatgccttttccctagaagattacaccaaatgtgacttgactgtctatgcaattgacccccaaaccaacagagccatcgatagaaatgagctttttaaatttttggatggcaaactacttgatatcaataaagactttcagccgtattatggggaaggaggacgcattctggagatccggactccagaggcagtgaccagcattaaaaagagaggagaaagtctaggatacacagaaggggccttgttggctctggccttcatcatcatcctctgctgcattcctgccatcttggtggttttggtcagctacagacagtttaaagtacgtcaagctgagtgtacaaagactgcacgaattcaggccgcattacccgcggctaaaccagcagtgccggctcctgcaccagtggcagcgcccccgccgccgccgccgcctccgccaggtgcgcatctctatgaagaacttggagacagctcaatgcataagtatgaaatgcctcaatatgggagtcgccgtcgattgttaccaccagctggacaggaggaatatggtgaggtggttggtgaagctgaggaagaatatgaggaggaagagtgggcaagaaaaagaatgatcaagttagttgttgatcgagagtatgaaaccagctcaactggagaagacagtgctcctgaatgtcagagaaaccgtcttcaccatcctagtatccacagtaatatcaacggcaatatatatattgcacagaatggttctgtggtgagaacccgccgtgcctgcctcacggacaacttaaaagttgcttcccctgttcgactgggagggccctttaagaaactagacaagttggcagtgacacatgaggagaatgtacctctgaacacattatcaaaggggccattttctactgaaaaaatgaatgcaagaccaactctggttacatttgccccttgccctgtggggactgacaatacagcggtgaagccactaaggaacaggctgaaaagcacagttgaacaggagtccatgattgacagtaagaacatcaaggaggctttggaatttcatagtgaccacacacagtctgatgatgaagagctttggatgggcccctggaacaacctccatataccaatgacaaaactgtgaccaattttttaaaagatattttaattaatttttacttacatttttaataaactgtgctttttattgtcactgagaaaacaatgtatggaatttatatcatgcacacaagctaaaactttgaacaatatgctttaaaattttaagagacagatttgcactcacattgttatcaattaatcgtttttcccagaaaatccttttggacatactttcactaaataacctatcgtttaaacatttagctgttttgttgggtcttgaatttttgttcattttaataaacaagaaataattactaaataatcatttatattttattgattaacatagattatgctttatttctagctccacaaaacatttttagtacatgtaattttattttccatagccaaaagggcaaaaaagaagtaagaggatatttacaggcaatgagtttatacagctgctgtctatactgccctaatttttaaaatgaaagctagaattgcaaagtaaagtaaatgagggaatcacctgtaaataattaattattttaaatcatgagcttgttttctttctttattgtcctgtataaaggttttcacattttaccataaatacatttatatcttgaccctttaggaaaccacttgaagtcgtatgtctttttatcaatattatttacaatattctcttgtcccttcatctcatatcaaatatggtagatactttagtttagtttaatcacttgaggttaaataattgtttggagcaacatggaaatctcacccttagcaaaagcttttagggaagtgagaaaggttcgagtaagcagtaatgcatctagaacgacaatttcataatggaagacatggtgaggttagggaagtctcacattaatgtcactagactttaatagtttgtaaacccagcatatcagagtaaaggaatttggcagggttgaaatgtatataatatataaagcttataaaggctatgaattcataacttcaaatgttgtgtttaacttcttccattttcaggttatttatagaatattttaatgcacatatttatgtgcctaaaatccagaaccaggaaatcattgcctgggcattttttaaaatcaaagaacatggtcttgattttttaccattgaacaaagcacagtgtttcatcataagtagaaatgaaaacagaatatcctttaaaaaacttgccttgtgtgttgcttattttccagatgatgtaaaaagaatgaaacaatatagattaagagaattcagaattctattgaatattacttagtatgatatagatgtagctcacttcaaattttgcacagtattgaccaagttcaggttttaatgaaatttcctcatgcatgcttaatatatggttgaaggactgaataatgcactattatttattcccctcttacatgtttcgcgtcttaaaaattgtttattattatgctatttcctcatttccaaagtgaatgaattgtactgacataaacttgccgacttgtaagagtagtatgtttttacttcagatttccaagaaaatatttgagatcaaatacagtaacatctcatctaccttattttattgagaattaatgcattccatacccttgccaaaaaaacaaaacaaaacaaacaaacaaaaaaaaacctagtggcattagctagattagaaacgtagaatcatgaccacacctcctggcctgccaaacaagcatccacattttcaaaagatcctaaggtggtttatatgcacattaaattttggaagcaatgaagtccggggcttattccttcaggcaccaaagcaatggtttttagtataggatactttgtataggaattagattaagcatatatttccctactaattcaatcagaggtcatcgaatataatttaatattatcttgatacccccagatcatctcagtcagcatcccttgatattctctctatatacagcttcatggctgcgtttttgtcctttgatttctggctgtgacatttaacttattctgttgttgtgcctttctcacatttttttctttcagtttatagcttctagtatcctgatgggaaagtttgtgttttttgtttgttttcttaatgttgaaaaatcatgaagcttaagatgggaattaggtacacggattcaaccaaatgttttgcgactcttagacgctttctttggttaccagtagatttggaaatatgatgttggcagaagtctagtggcctgacatatgagatgtcactgtattttaaactacattttttatgagaaaatatgcaaaattttacaagccacttagcagacacatttcagtaatttaaacttgatcatttcagtaaaaacaatcatgaggtcaatcatctgttacttaatggagatagtataaagagaagcagaatttacacagagcaaccaaaccaaatatttggtcagtatatttttgggtaacgtagagcagcaaaattattactaactaaataaatctggatcaattaaatagttactttcatagaactttcactagtctataaatccctgactcaggattaaaactgtggaacccagaggaaatacccaggtatgtttaatcttaagaatacttcatataaataacgtttcaatgtaaatatttataaagaaattggttgttatttttcctaggaaggtgtaggaaggttttcttgttgttctcaatcagcactagcttcaatcaggcagaagaaacagcaggtcttggctaatcgaggtgagaacagaatgatgtaatgactaatattgcaacccgttgattttagaaggtcttgtgggcattaagggaaagcagaggaagaatgagaaaatatggtcagagtgacataggacatttgtgacttaatgaccatcgaatcacaggtgttaatctccctctctcaatttgtctttctcattaattacagactctgagagttgtcatagaattgcaaccgtaggttggccaaaaccatctttttaaaatacagaagaaagtttgccttgaattttatatgtgatatgtcattcatgttattttaccacattgttcacagggatgttaaagactattatttacttaagtggttgttccaaaggtgattcagtagttaccattaaaatattatttaaaaacatttttatatcatagagccagaagtaattgaatattgactctcgagggaagacattttctgtcttttatttcatgagctttgatttttctctttctctgcttcaccttctgcactttataccttaagtgggatttatataccacttgaatttaattagcaaaataggcaaaaagtgctaataatctattctcagggcagatgcctattggtgcctgcaaattacacagcgataaggctgaaggataggttcaaaataatgttgaggacttacacattttatagatagtttctttctattcccaaatggtatgtgaaatttttgttctattttttttattggttttcaatagttaattttgatctttatcataagaagctttagttatagactggtatttttttcattgcaatctactttaaatttatggtcagttaagcacatgtatggaagattcgaacattgtctatagtttgaaaaatctatcaacaccttcactgctttcccaatttctttatccaaatacctgttcttccttaacaaatattatgttactgtataagaatctgaattagaagttttaagttaaaatgcattgttattcactacacaatgtttcaaaaataaattttcatttgaaaa

SEQ ID NO: 89 - DNA, 9237 bp, Homo sapiens
caacgtgctgagctaatagcgacagatagagggcagacagattcctgctagcagcttagtgttagttgcttgtggtaactaaggcaggtggcatacatctcagaacgtggagaatgatggtatgctttctgagttaacatgttgaactgttttgcttttctaaaaattttcctagtaacattttcttgatgatatgagagtggatatcaatgcctcacagaaacaagaggtggaacatgtgaatgaatcgtcttggaactagattatgagcactggttctttttaaagggatgtgcaagaggcagccttggcaagaaaacttgctgcataatcttacatggactaaagatgaaactttaaaccgcaaatcagctttgagtgaactttgacagaagatgtttcgacagttttatctctggacatgtttagcttcagggatcatcctgggctctctctttgaaatctgcttgggccagtatgatgatgattgcaaactagctaggggaggaccaccagctaccatagttgctattgatgaagaaagtcggaatggtacaattctggtggacaacatgctgatcaaagggactgctggaggaccagaccccaccatagaactttctttaaaggataatgtggattactgggtgttgatggatcctgttaagcaaatgcttttcctgaacagcaccggaagagttctggatagagatccaccgatgaacatacactccattgtggtgcaggtccagtgcatcaacaaaaaagtgggcactattatctaccatgaagtgcgaatagtggtgagagacaggaatgacaactcacccactttcaagcatgaaagctactatgccacagtgaatgagctcactccagttggtaccacaatattcacaggattttcaggagacaatggagctacagatatagatgatggaccaaatggacagatagagtatgttattcagtataatccagatgatccgacatccaatgacacctttgaaattcccctaatgttgactggaaatatagtgttaaggaagaggctcaactatgaagataagactcgctactttgtcataatccaagctaatgaccgtgcccaaaatctgaatgagaggcgaaccaccaccaccactctcacagtggatgttctggatggagatgacttgggtccaatgtttcttccttgtgtccttgtgccaaacactcgtgattgccgtccactcacttatcaagctgccatacctgagttgagaactccggaagaactgaaccccattattgttacgccaccaatccaagccattgatcaggaccggaatattcaaccgccatcagataggccaggaatcctctattccatccttgttgggactcctgaggattacccacgatttttccatatgcatcctaggacagcagaacttagtctcctggagccagtaaacagagactttcaccagaaatttgatttggttattaaggctgaacaagacaatggtcatcctcttcctgcctttgccggtctacacattgaaatactggatgaaaacaatcaaagtccatattttacaatgcccagttatcaaggctatatcctggaatctgccccagtgggagcaaccatttcggacagtctcaatttgacttcacctttaagaatagtagctctggacaaggacatagaagatacaaaagacccagagcttcacctttttctgaatgactacacctcagtcttcaccgtcacacagactggtattactcgctacctcaccttacttcaaccagtggacagggaagaacagcaaacttacaccttttcgataacagcatttgatggtgtacaagaaagtgagccagtcatcgtcaatattcaagtgatggatgcaaatgataacacgccaaccttccctgaaatatcctatgatgtgtatgtttatacagacatgagacctggggacagtgtcatacagctcactgcagtcgacgcagacgaagggtcaaatggggagatcacatatgaaatccttgttggggctcagggagacttcatcatcaataaaacaacagggcttatcaccatcgctccaggggtggaaatgatagtcgggcggacttacgcactcacggtccaagcagcggataatgctcctcctgcagagcgaaggaactccatctgcactgtgtatattgaagtgcttccaccaaataatcaaagccctcctcgcttcccacagctgatgtatagccttgaaattagtgaagccatgagggttggtgctgttttattaaatctacaggcaactgatcgagagggagactcaataacatatgccattgagaatggagatcctcagagagtttttaatctttcagaaaccacggggattctaaccttagggaaagcactggacagggaaagcactgatcgctacattctgatcatcacagcttcagatggcaggccagatgggacctcaactgccacagtaaacatagtggtgacagatgtcaatgacaatgctccagtgtttgatccttatctgccaagaaatttatctgtggtggaagaagaagccaatgcctttgtgggtcaagtaaaagcaacagaccctgatgctggaataaatggtcaagtgcactacagtttgggtaactttaataatctttttcgtatcacatccaatgggagcatttacacagcagtgaagcttaacagagaagtcagggactactatgaacttgttgttgtggcaacagatggagcagtacaccctcgtcattcaactctaaccttggccatcaaggttttggacattgatgataacagtcctgtgttcaccaattcaacatacactgtccttgttgaagagaatttgccagctgggactaccatccttcaaatagaggccaaagatgtcgaccttggagcaaatgtgtcttaccggataagaagcccagaagtgaagcacttttttgcactacatccatttacaggagaactatcgcttttaaggagtttagattatgaggcatttccagaccaagaagcaagtatcacttttctggtagaggcctttgatatttatggaacaatgccacctggtattgctactgtcacagtgattgtaaaggatatgaatgattatcctcctgtctttagtaaacgaatatacaaagggatggtggctccggatgcagtcaagggtacacctatcacaacagtttatgctgaagatgcagaccctcctggattacctgcaagtcgtgtgaggtatagagtagatgatgtacagtttccttaccctgccagtatttttgaagtggaagaagattctggaagagtaataacacgagtcaatcttaatgaagaacctacaacaatttttaagttggtggtggttgcttttgatgatggggagcctgtgatgtccagcagtgccacagtgaagattcttgtcttacatcctggtgagatcccacgcttcacacaggaggaatatagacctcctccagtaagtgaacttgccaccaaagggaccatggttggtgtaatttctgctgctgccattaatcaaagtattgtgtactccattgtttcaggaaatgaagaagatacatttggaattaataacatcacaggtgttatctatgtgaatggacctctggattatgagaccaggacaagctatgtacttcgagtccaagctgattccctggaagtggtccttgccaatctccgagttccttcaaaaagcaatacagctaaagtatacattgagattcaggatgaaaataatcatcccccagtgtttcagaaaaaattctacatcggaggtgtatctgaagatgcaagaatgtttacttctgtactcagagtgaaggctactgataaagatactggcaattatagtgtcatggcctacagactcataataccaccaattaaagagggaaaagaaggatttgtagtggaaacatatacagggcttatcaaaactgctatgctcttccataatatgaggagatcctacttcaagtttcaagttattgcaactgacgactatgggaagggactgagcggcaaagccgatgtactcgtctccgtggtcaatcagctggatatgcaagtcattgtttccaatgtgcctcctactctagtggaaaaaaagatagaagatcttacagagatcttggatcgctatgttcaggaacaaattcctggtgccaaggtcgtagtggagtccattggagctcgccggcatggagatgccttttccctagaagattacaccaaatgtgacttgactgtctatgcaattgacccccaaaccaacagagccatcgatagaaatgagctttttaaatttttggatggcaaactacttgatatcaataaagactttcagccgtattatggggaaggaggacgcattctggagatccggactccagaggcagtgaccagcattaaaaagagaggagaaagtctaggatacacagaaggggccttgttggctctggccttcatcatcatcctctgctgcattcctgccatcttggtggttttggtcagctacagacagtttaaagtacgtcaagctgagtgtacaaagactgcacgaattcaggccgcattacccgcggctaaaccagcagtgccggctcctgcaccagtggcagcgcccccgccgccgccgccgcctccgccaggtgcgcatctctatgaagaacttggagacagctcaatgcataagtatgaaatgcctcaatatgggagtcgccgtcgattgttaccaccagctggacaggaggaatatggtgaggtggttggtgaagctgaggaagaatatgaggaggaagagtgggcaagaaaaagaatgatcaagttagttgttgatcgagagtatgaaaccagctcaactggagaagacagtgctcctgaatgtcagagaaaccgtcttcaccatcctagtatccacagtaatatcaacggcaatatatatattgcacagaatggttctgtggtgagaacccgccgtgcctgcctcacggacaacttaaaagttgcttcccctgttcgactgggagggccctttaagaaactagacaagttggcagtgacacatgaggagaatgtacctctgaacacattatcaaaggggccattttctactgaaaaaatgaatgcaagaccaactctggttacatttgccccttgccctgtggggactgacaatacagcggtgaagccactaaggaacaggctgaaaagcacagttgaacaggagtccatgattgacagtaagaacatcaaggaggctttggaatttcatagtgaccacacacagtctgatgatgaagagctttggatgggcccctggaacaacctccatataccaatgacaaaactgtgaccaattttttaaaagatattttaattaatttttacttacatttttaataaactgtgctttttattgtcactgagaaaacaatgtatggaatttatatcatgcacacaagctaaaactttgaacaatatgctttaaaattttaagagacagatttgcactcacattgttatcaattaatcgtttttcccagaaaatccttttggacatactttcactaaataacctatcgtttaaacatttagctgttttgttgggtcttgaatttttgttcattttaataaacaagaaataattactaaataatcatttatattttattgattaacatagattatgctttatttctagctccacaaaacatttttagtacatgtaattttattttccatagccaaaagggcaaaaaagaagtaagaggatatttacaggcaatgagtttatacagctgctgtctatactgccctaatttttaaaatgaaagctagaattgcaaagtaaagtaaatgagggaatcacctgtaaataattaattattttaaatcatgagcttgttttctttctttattgtcctgtataaaggttttcacattttaccataaatacatttatatcttgaccctttaggaaaccacttgaagtcgtatgtctttttatcaatattatttacaatattctcttgtcccttcatctcatatcaaatatggtagatactttagtttagtttaatcacttgaggttaaataattgtttggagcaacatggaaatctcacccttagcaaaagcttttagggaagtgagaaaggttcgagtaagcagtaatgcatctagaacgacaatttcataatggaagacatggtgaggttagggaagtctcacattaatgtcactagactttaatagtttgtaaacccagcatatcagagtaaaggaatttggcagggttgaaatgtatataatatataaagcttataaaggctatgaattcataacttcaaatgttgtgtttaacttcttccattttcaggttatttatagaatattttaatgcacatatttatgtgcctaaaatccagaaccaggaaatcattgcctgggcattttttaaaatcaaagaacatggtcttgattttttaccattgaacaaagcacagtgtttcatcataagtagaaatgaaaacagaatatcctttaaaaaacttgccttgtgtgttgcttattttccagatgatgtaaaaagaatgaaacaatatagattaagagaattcagaattctattgaatattacttagtatgatatagatgtagctcacttcaaattttgcacagtattgaccaagttcaggttttaatgaaatttcctcatgcatgcttaatatatggttgaaggactgaataatgcactattatttattcccctcttacatgtttcgcgtcttaaaaattgtttattattatgctatttcctcatttccaaagtgaatgaattgtactgacataaacttgccgacttgtaagagtagtatgtttttacttcagatttccaagaaaatatttgagatcaaatacagtaacatctcatctaccttattttattgagaattaatgcattccatacccttgccaaaaaaacaaaacaaaacaaacaaacaaaaaaaaacctagtggcattagctagattagaaacgtagaatcatgaccacacctcctggcctgccaaacaagcatccacattttcaaaagatcctaaggtggtttatatgcacattaaattttggaagcaatgaagtccggggcttattccttcaggcaccaaagcaatggtttttagtataggatactttgtataggaattagattaagcatatatttccctactaattcaatcagaggtcatcgaatataatttaatattatcttgatacccccagatcatctcagtcagcatcccttgatattctctctatatacagcttcatggctgcgtttttgtcctttgatttctggctgtgacatttaacttattctgttgttgtgcctttctcacatttttttctttcagtttatagcttctagtatcctgatgggaaagtttgtgttttttgtttgttttcttaatgttgaaaaatcatgaagcttaagatgggaattaggtacacggattcaaccaaatgttttgcgactcttagacgctttctttggttaccagtagatttggaaatatgatgttggcagaagtctagtggcctgacatatgagatgtcactgtattttaaactacattttttatgagaaaatatgcaaaattttacaagccacttagcagacacatttcagtaatttaaacttgatcatttcagtaaaaacaatcatgaggtcaatcatctgttacttaatggagatagtataaagagaagcagaatttacacagagcaaccaaaccaaatatttggtcagtatatttttgggtaacgtagagcagcaaaattattactaactaaataaatctggatcaattaaatagttactttcatagaactttcactagtctataaatccctgactcaggattaaaactgtggaacccagaggaaatacccaggtatgtttaatcttaagaatacttcatataaataacgtttcaatgtaaatatttataaagaaattggttgttatttttcctaggaaggtgtaggaaggttttcttgttgttctcaatcagcactagcttcaatcaggcagaagaaacagcaggtcttggctaatcgaggtgagaacagaatgatgtaatgactaatattgcaacccgttgattttagaaggtcttgtgggcattaagggaaagcagaggaagaatgagaaaatatggtcagagtgacataggacatttgtgacttaatgaccatcgaatcacaggtgttaatctccctctctcaatttgtctttctcattaattacagactctgagagttgtcatagaattgcaaccgtaggttggccaaaaccatctttttaaaatacagaagaaagtttgccttgaattttatatgtgatatgtcattcatgttattttaccacattgttcacagggatgttaaagactattatttacttaagtggttgttccaaaggtgattcagtagttaccattaaaatattatttaaaaacatttttatatcatagagccagaagtaattgaatattgactctcgagggaagacattttctgtcttttatttcatgagctttgatttttctctttctctgcttcaccttctgcactttataccttaagtgggatttatataccacttgaatttaattagcaaaataggcaaaaagtgctaataatctattctcagggcagatgcctattggtgcctgcaaattacacagcgataaggctgaaggataggttcaaaataatgttgaggacttacacattttatagatagtttctttctattcccaaatggtatgtgaaatttttgttctattttttttattggttttcaatagttaattttgatctttatcataagaagctttagttatagactggtatttttttcattgcaatctactttaaatttatggtcagttaagcacatgtatggaagattcgaacattgtctatagtttgaaaaatctatcaacaccttcactgctttcccaatttctttatccaaatacctgttcttccttaacaaatattatgttactgtataagaatctgaattagaagttttaagttaaaatgcattgttattcactacacaatgtttcaaaaataaattttcatttgaaaa

SEQ ID NO: 90 - DNA, 6952 bp, Homo sapiens
caacgtgctgagctaatagcgacagatagagggcagacagattcctgctagcagcttagtgttagttgcttgtggtaactaaggcaggtggcatacatctcagaacgtggagaatgatggtatgctttctgagttaacatgttgaactgttttgcttttctaaaaattttcctagtaacattttcttgatgatatgagagtggatatcaatgcctcacagaaacaagaggtggaacatgtgaatgaatcgtcttggaactagattatgagcactggttctttttaaagggatgtgcaagaggcagccttggcaagaaaacttgctgcataatcttacatggactaaagatgaaactttaaaccgcaaatcagctttgagtgaactttgacagaagatgtttcgacagttttatctctggacatgtttagcttcagggatcatcctgggctctctctttgaaatctgcttgggccagtatgatgatggtacaattctggtggacaacatgctgatcaaagggactgctggaggaccagaccccaccatagaactttctttaaaggataatgtggattactgggtgttgatggatcctgttaagcaaatgcttttcctgaacagcaccggaagagttctggatagagatccaccgatgaacatacactccattgtggtgcaggtccagtgcatcaacaaaaaagtgggcactattatctaccatgaagtgcgaatagtggtgagagacaggaatgacaactcacccactttcaagcatgaaagctactatgccacagtgaatgagctcactccagttggtaccacaatattcacaggattttcaggagacaatggagctacagatatagatgatggaccaaatggacagatagagtatgttattcagtataatccagatgatccgacatccaatgacacctttgaaattcccctaatgttgactggaaatatagtgttaaggaagaggctcaactatgaagataagactcgctactttgtcataatccaagctaatgaccgtgcccaaaatctgaatgagaggcgaaccaccaccaccactctcacagtggatgttctggatggagatgacttgggtccaatgtttcttccttgtgtccttgtgccaaacactcgtgattgccgtccactcacttatcaagctgccatacctgagttgagaactccggaagaactgaaccccattattgttacgccaccaatccaagccattgatcaggaccggaatattcaaccgccatcagataggccaggaatcctctattccatccttgttgggactcctgaggattacccacgatttttccatatgcatcctaggacagcagaacttagtctcctggagccagtaaacagagactttcaccagaaatttgatttggttattaaggctgaacaagacaatggtcatcctcttcctgcctttgccggtctacacattgaaatactggatgaaaacaatcaaagtccatattttacaatgcccagttatcaaggctatatcctggaatctgccccagtgggagcaaccatttcggacagtctcaatttgacttcacctttaagaatagtagctctggacaaggacatagaagatacaaaagacccagagcttcacctttttctgaatgactacacctcagtcttcaccgtcacacagactggtattactcgctacctcaccttacttcaaccagtggacagggaagaacagcaaacttacaccttttcgataacagcatttgatggtgtacaagaaagtgagccagtcatcgtcaatattcaagtgatggatgcaaatgataacacgccaaccttccctgaaatatcctatgatgtgtatgtttatacagacatgagacctggggacagtgtcatacagctcactgcagtcgacgcagacgaagggtcaaatggggagatcacatatgaaatccttgttggggctcagggagacttcatcatcaataaaacaacagggcttatcaccatcgctccaggggtggaaatgatagtcgggcggacttacgcactcacggtccaagcagcggataatgctcctcctgcagagcgaaggaactccatctgcactgtgtatattgaagtgcttccaccaaataatcaaagccctcctcgcttcccacagctgatgtatagccttgaaattagtgaagccatgagggttggtgctgttttattaaatctacaggcaactgatcgagagggagactcaataacatatgccattgagaatggagatcctcagagagtttttaatctttcagaaaccacggggattctaaccttagggaaagcactggacagggaaagcactgatcgctacattctgatcatcacagcttcagatggcaggccagatgggacctcaactgccacagtaaacatagtggtgacagatgtcaatgacaatgctccagtgtttgatccttatctgccaagaaatttatctgtggtggaagaagaagccaatgcctttgtgggtcaagtaaaagcaacagaccctgatgctggaataaatggtcaagtgcactacagtttgggtaactttaataatctttttcgtatcacatccaatgggagcatttacacagcagtgaagcttaacagagaagtcagggactactatgaacttgttgttgtggcaacagatggagcagtacaccctcgtcattcaactctaaccttggccatcaaggttttggacattgatgataacagtcctgtgttcaccaattcaacatacactgtccttgttgaagagaatttgccagctgggactaccatccttcaaatagaggccaaagatgtcgaccttggagcaaatgtgtcttaccggataagaagcccagaagtgaagcacttttttgcactacatccatttacaggagaactatcgcttttaaggagtttagattatgaggcatttccagaccaagaagcaagtatcacttttctggtagaggcctttgatatttatggaacaatgccacctggtattgctactgtcacagtgattgtaaaggatatgaatgattatcctcctgtctttagtaaacgaatatacaaagggatggtggctccggatgcagtcaagggtacacctatcacaacagtttatgctgaagatgcagaccctcctggattacctgcaagtcgtgtgaggtatagagtagatgatgtacagtttccttaccctgccagtatttttgaagtggaagaagattctggaagagtaataacacgagtcaatcttaatgaagaacctacaacaatttttaagttggtggtggttgcttttgatgatggggagcctgtgatgtccagcagtgccacagtgaagattcttgtcttacatcctggtgagatcccacgcttcacacaggaggaatatagacctcctccagtaagtgaacttgccaccaaagggaccatggttggtgtaatttctgctgctgccattaatcaaagtattgtgtactccattgtttcaggaaatgaagaagatacatttggaattaataacatcacaggtgttatctatgtgaatggacctctggattatgagaccaggacaagctatgtacttcgagtccaagctgattccctggaagtggtccttgccaatctccgagttccttcaaaaagcaatacagctaaagtatacattgagattcaggatgaaaataatcatcccccagtgtttcagaaaaaattctacatcggaggtgtatctgaagatgcaagaatgtttacttctgtactcagagtgaaggctactgataaagatactggcaattatagtgtcatggcctacagactcataataccaccaattaaagagggaaaagaaggatttgtagtggaaacatatacagggcttatcaaaactgctatgctcttccataatatgaggagatcctacttcaagtttcaagttattgcaactgacgactatgggaagggactgagcggcaaagccgatgtactcgtctccgtggtcaatcagctggatatgcaagtcattgtttccaatgtgcctcctactctagtggaaaaaaagatagaagatcttacagagatcttggatcgctatgttcaggaacaaattcctggtgccaaggtcgtagtggagtccattggagctcgccggcatggagatgccttttccctagaagattacaccaaatgtgacttgactgtctatgcaattgacccccaaaccaacagagccatcgatagaaatgagctttttaaatttttggatggcaaactacttgatatcaataaagactttcagccgtattatggggaaggaggacgcattctggagatccggactccagaggcagtgaccagcattaaaaagagaggagaaagtctaggatacacagaaggggccttgttggctctggccttcatcatcatcctctgctgcattcctgccatcttggtggttttggtcagctacagacaacgtcaagctgagtgtacaaagactgcacgaattcaggccgcattacccgcggctaaaccagcagtgccggctcctgcaccagtggcagcgcccccgccgccgccgccgcctccgccaggtgcgcatctctatgaagaacttggagacagctcaatgcataatcttttccttctctaccattttcaacaaagcaggggaaataactcagtctcagaagacaggaaacatcaacaagttgtgatgcccttttcttccaatactattgaggctcacaagtcagctcatgtagacggatcacttaagagcaacaaactgaagtctgcaagaaaattcacatttctatctgatgaggatgacttaagtgcccataatcccctttataaggaaaacataagtcaagtatcaacaaattcagacatttcacagagaacagattttgtagacccattttcacccaaaatacaagccaagagtaagtctctgaggggcccaagagaaaagattcagaggctgtggagtcagtcagtcagcttacccaggaggctgatgaggaaagttccaaatagaccagagatcatagatctgcagcagtggcaaggcaccaggcagaaagctgaaaatgaaaacactggaatctgtacaaacaaaagaggtagcagcaatccattgcttacaactgaagaggcaaatttgacagagaaagaggaaataaggcaaggtgaaacactgatgatagaaggaacagaacagttgaaatctctctcttcagactcttcattttgctttcccaggcctcacttctcattctccactttgccaactgtttcaagaactgtggaactcaaatcagaacctaatgtcatcagttctcctgctgagtgttccttggaactttctccttcaaggccttgtgttttacattcttcactctctaggagagagacacctatttgtatgttacctattgaaaccgaaagaaatatttttgaaaattttgcccatccaccaaacatctctccttctgcctgtccccttccccctcctcctcctatttctcctccttctcctcctcctgctcctgctcctcttgctcctcctcctgacatttctcctttttctcttttttgtcctcctccctctcctccttctatccctcttcctcttcctcctcctacattttttccactttccgtttcaacgtctggtcccccaacaccacctcttctacctccatttccaactcctcttcctccaccacctccttctattccttgccctccacctccttcagcttcatttctgtccacagagtgtgtctgtataacaggtgttaaatgcacgaccaacttgatgcctgccgagaaaattaagtcctctatgacacagctatcaacaacgacagtgtgtaaaacagaccctcagagagaaccaaaaggcatcctcagacacgttaaaaacttagcagaacttgaaaaatcagtagctaacatgtacagtcaaatagaaaaaaactatctacgcacaaatgtttcagaacttcaaactatgtgcccttcagaagtaacaaatatggaaatcacatctgaacaaaacaaggggagtttgaacaatattgtcgagggaactgaaaaacaatctcacagtcaatctacttcactgtaatgttgcttttcttattttagtcgggcaaacctcttgttgatcatagtcttcaagttgaacatcaaatttgaacgtcaaagaagactctattattttaccccaaattcaatgaaatgcagttttttttctcgtttttaatttaaaaagatattaacctcatcactactaactcactcatataatagatttaccttactttttaaaaactacaaagtagcataatttgttctacatttatttgaaaagtaagtaattttaatctcttttttagtgggaatatgtgggcatgaaaattagatacccaacttaaaccaaaggcatgtctatcatgtggatgcagtaacatttacatttagtttttgatcgtagttttatatgaatgttccaagaaaaaagcagactgttacaaataagttaaaactgatatgattgataggttctgttttttcttgaagcctatgtatttggtaagaagaaatactaccgaagtaaaatataatgtacctagattgtaggagatgacagacataaggtatttcaaaataaatctcaggtgctataacatgtagtcatctgttttctgataagaacatcttttactctgacttgcttttatcttagtagtatgcttatggatttagtagtatgcttatggatttgataaatcttatactttttcagttgctgtcttattctctttatttctcattgtgctttcccttcccttctttataatgaaaataaatcttgagtcgttg

SEQ ID NO: 91 - DNA, 7021 bp, Homo sapiens
caacgtgctgagctaatagcgacagatagagggcagacagattcctgctagcagcttagtgttagttgcttgtggtaactaaggcaggtggcatacatctcagaacgtggagaatgatggtatgctttctgagttaacatgttgaactgttttgcttttctaaaaattttcctagtaacattttcttgatgatatgagagtggatatcaatgcctcacagaaacaagaggtggaacatgtgaatgaatcgtcttggaactagattatgagcactggttctttttaaagggatgtgcaagaggcagccttggcaagaaaacttgctgcataatcttacatggactaaagatgaaactttaaaccgcaaatcagctttgagtgaactttgacagaagatgtttcgacagttttatctctggacatgtttagcttcagggatcatcctgggctctctctttgaaatctgcttgggccagtatgatgatgattgcaaactagctaggggaggaccaccagctaccatagttgctattgatgaagaaagtcggaatggtacaattctggtggacaacatgctgatcaaagggactgctggaggaccagaccccaccatagaactttctttaaaggataatgtggattactgggtgttgatggatcctgttaagcaaatgcttttcctgaacagcaccggaagagttctggatagagatccaccgatgaacatacactccattgtggtgcaggtccagtgcatcaacaaaaaagtgggcactattatctaccatgaagtgcgaatagtggtgagagacaggaatgacaactcacccactttcaagcatgaaagctactatgccacagtgaatgagctcactccagttggtaccacaatattcacaggattttcaggagacaatggagctacagatatagatgatggaccaaatggacagatagagtatgttattcagtataatccagatgatccgacatccaatgacacctttgaaattcccctaatgttgactggaaatatagtgttaaggaagaggctcaactatgaagataagactcgctactttgtcataatccaagctaatgaccgtgcccaaaatctgaatgagaggcgaaccaccaccaccactctcacagtggatgttctggatggagatgacttgggtccaatgtttcttccttgtgtccttgtgccaaacactcgtgattgccgtccactcacttatcaagctgccatacctgagttgagaactccggaagaactgaaccccattattgttacgccaccaatccaagccattgatcaggaccggaatattcaaccgccatcagataggccaggaatcctctattccatccttgttgggactcctgaggattacccacgatttttccatatgcatcctaggacagcagaacttagtctcctggagccagtaaacagagactttcaccagaaatttgatttggttattaaggctgaacaagacaatggtcatcctcttcctgcctttgccggtctacacattgaaatactggatgaaaacaatcaaagtccatattttacaatgcccagttatcaaggctatatcctggaatctgccccagtgggagcaaccatttcggacagtctcaatttgacttcacctttaagaatagtagctctggacaaggacatagaagatacaaaagacccagagcttcacctttttctgaatgactacacctcagtcttcaccgtcacacagactggtattactcgctacctcaccttacttcaaccagtggacagggaagaacagcaaacttacaccttttcgataacagcatttgatggtgtacaagaaagtgagccagtcatcgtcaatattcaagtgatggatgcaaatgataacacgccaaccttccctgaaatatcctatgatgtgtatgtttatacagacatgagacctggggacagtgtcatacagctcactgcagtcgacgcagacgaagggtcaaatggggagatcacatatgaaatccttgttggggctcagggagacttcatcatcaataaaacaacagggcttatcaccatcgctccaggggtggaaatgatagtcgggcggacttacgcactcacggtccaagcagcggataatgctcctcctgcagagcgaaggaactccatctgcactgtgtatattgaagtgcttccaccaaataatcaaagccctcctcgcttcccacagctgatgtatagccttgaaattagtgaagccatgagggttggtgctgttttattaaatctacaggcaactgatcgagagggagactcaataacatatgccattgagaatggagatcctcagagagtttttaatctttcagaaaccacggggattctaaccttagggaaagcactggacagggaaagcactgatcgctacattctgatcatcacagcttcagatggcaggccagatgggacctcaactgccacagtaaacatagtggtgacagatgtcaatgacaatgctccagtgtttgatccttatctgccaagaaatttatctgtggtggaagaagaagccaatgcctttgtgggtcaagtaaaagcaacagaccctgatgctggaataaatggtcaagtgcactacagtttgggtaactttaataatctttttcgtatcacatccaatgggagcatttacacagcagtgaagcttaacagagaagtcagggactactatgaacttgttgttgtggcaacagatggagcagtacaccctcgtcattcaactctaaccttggccatcaaggttttggacattgatgataacagtcctgtgttcaccaattcaacatacactgtccttgttgaagagaatttgccagctgggactaccatccttcaaatagaggccaaagatgtcgaccttggagcaaatgtgtcttaccggataagaagcccagaagtgaagcacttttttgcactacatccatttacaggagaactatcgcttttaaggagtttagattatgaggcatttccagaccaagaagcaagtatcacttttctggtagaggcctttgatatttatggaacaatgccacctggtattgctactgtcacagtgattgtaaaggatatgaatgattatcctcctgtctttagtaaacgaatatacaaagggatggtggctccggatgcagtcaagggtacacctatcacaacagtttatgctgaagatgcagaccctcctggattacctgcaagtcgtgtgaggtatagagtagatgatgtacagtttccttaccctgccagtatttttgaagtggaagaagattctggaagagtaataacacgagtcaatcttaatgaagaacctacaacaatttttaagttggtggtggttgcttttgatgatggggagcctgtgatgtccagcagtgccacagtgaagattcttgtcttacatcctggtgagatcccacgcttcacacaggaggaatatagacctcctccagtaagtgaacttgccaccaaagggaccatggttggtgtaatttctgctgctgccattaatcaaagtattgtgtactccattgtttcaggaaatgaagaagatacatttggaattaataacatcacaggtgttatctatgtgaatggacctctggattatgagaccaggacaagctatgtacttcgagtccaagctgattccctggaagtggtccttgccaatctccgagttccttcaaaaagcaatacagctaaagtatacattgagattcaggatgaaaataatcatcccccagtgtttcagaaaaaattctacatcggaggtgtatctgaagatgcaagaatgtttacttctgtactcagagtgaaggctactgataaagatactggcaattatagtgtcatggcctacagactcataataccaccaattaaagagggaaaagaaggatttgtagtggaaacatatacagggcttatcaaaactgctatgctcttccataatatgaggagatcctacttcaagtttcaagttattgcaactgacgactatgggaagggactgagcggcaaagccgatgtactcgtctccgtggtcaatcagctggatatgcaagtcattgtttccaatgtgcctcctactctagtggaaaaaaagatagaagatcttacagagatcttggatcgctatgttcaggaacaaattcctggtgccaaggtcgtagtggagtccattggagctcgccggcatggagatgccttttccctagaagattacaccaaatgtgacttgactgtctatgcaattgacccccaaaccaacagagccatcgatagaaatgagctttttaaatttttggatggcaaactacttgatatcaataaagactttcagccgtattatggggaaggaggacgcattctggagatccggactccagaggcagtgaccagcattaaaaagagaggagaaagtctaggatacacagaaggggccttgttggctctggccttcatcatcatcctctgctgcattcctgccatcttggtggttttggtcagctacagacagtttaaagtacgtcaagctgagtgtacaaagactgcacgaattcaggccgcattacccgcggctaaaccagcagtgccggctcctgcaccagtggcagcgcccccgccgccgccgccgcctccgccaggtgcgcatctctatgaagaacttggagacagctcaattcttttccttctctaccattttcaacaaagcaggggaaataactcagtctcagaagacaggaaacatcaacaagttgtgatgcccttttcttccaatactattgaggctcacaagtcagctcatgtagacggatcacttaagagcaacaaactgaagtctgcaagaaaattcacatttctatctgatgaggatgacttaagtgcccataatcccctttataaggaaaacataagtcaagtatcaacaaattcagacatttcacagagaacagattttgtagacccattttcacccaaaatacaagccaagagtaagtctctgaggggcccaagagaaaagattcagaggctgtggagtcagtcagtcagcttacccaggaggctgatgaggaaagttccaaatagaccagagatcatagatctgcagcagtggcaaggcaccaggcagaaagctgaaaatgaaaacactggaatctgtacaaacaaaagaggtagcagcaatccattgcttacaactgaagaggcaaatttgacagagaaagaggaaataaggcaaggtgaaacactgatgatagaaggaacagaacagttgaaatctctctcttcagactcttcattttgctttcccaggcctcacttctcattctccactttgccaactgtttcaagaactgtggaactcaaatcagaacctaatgtcatcagttctcctgctgagtgttccttggaactttctccttcaaggccttgtgttttacattcttcactctctaggagagagacacctatttgtatgttacctattgaaaccgaaagaaatatttttgaaaattttgcccatccaccaaacatctctccttctgcctgtccccttccccctcctcctcctatttctcctccttctcctcctcctgctcctgctcctcttgctcctcctcctgacatttctcctttttctcttttttgtcctcctccctctcctccttctatccctcttcctcttcctcctcctacattttttccactttccgtttcaacgtctggtcccccaacaccacctcttctacctccatttccaactcctcttcctccaccacctccttctattccttgccctccacctccttcagcttcatttctgtccacagagtgtgtctgtataacaggtgttaaatgcacgaccaacttgatgcctgccgagaaaattaagtcctctatgacacagctatcaacaacgacagtgtgtaaaacagaccctcagagagaaccaaaaggcatcctcagacacgttaaaaacttagcagaacttgaaaaatcagtagctaacatgtacagtcaaatagaaaaaaactatctacgcacaaatgtttcagaacttcaaactatgtgcccttcagaagtaacaaatatggaaatcacatctgaacaaaacaaggggagtttgaacaatattgtcgagggaactgaaaaacaatctcacagtcaatctacttcactgtaatgttgcttttcttattttagtcgggcaaacctcttgttgatcatagtcttcaagttgaacatcaaatttgaacgtcaaagaagactctattattttaccccaaattcaatgaaatgcagttttttttctcgtttttaatttaaaaagatattaacctcatcactactaactcactcatataatagatttaccttactttttaaaaactacaaagtagcataatttgttctacatttatttgaaaagtaagtaattttaatctcttttttagtgggaatatgtgggcatgaaaattagatacccaacttaaaccaaaggcatgtctatcatgtggatgcagtaacatttacatttagtttttgatcgtagttttatatgaatgttccaagaaaaaagcagactgttacaaataagttaaaactgatatgattgataggttctgttttttcttgaagcctatgtatttggtaagaagaaatactaccgaagtaaaatataatgtacctagattgtaggagatgacagacataaggtatttcaaaataaatctcaggtgctataacatgtagtcatctgttttctgataagaacatcttttactctgacttgcttttatcttagtagtatgcttatggatttagtagtatgcttatggatttgataaatcttatactttttcagttgctgtcttattctctttatttctcattgtgctttcccttcccttctttataatgaaaataaatcttgagtcgttg

SEQ ID NO: 92 - DNA, 2526 bp, Homo sapiens
taaagaagtcccggccgggccgctgcactccccgcgcgcatccgtgcgccgcccgaggctgtctaaggagtcggcggccattttgttcttctcgtggttccagtggggagagaaggaggaagtagggagcggggtggcaggggggggacccgccgcggctgctgccaccgccgccaccaccgcctctgctcgtggcgtgggaaaggaggtgtgagtcccgggcgcgagccggcggcggcgccgctgcgggagggtcggcggtgggaaggcgatggcggatttagataaactcaacatcgacagcattatccaacggctgctggaagtgagagggtccaagcctggtaagaatgtccagcttcaggagaatgaaatcagaggactgtgcttaaagtctcgtgaaatctttctcagtcagcctatcctactagaacttgaagcaccactcaaaatatgtggtgacatccatggacaatactatgatttgctgcgactttttgagtacggtggtttcccaccagaaagcaactacctgtttcttggggactatgtggacaggggaaagcagtcattggagacgatctgcctcttactggcctacaaaataaaatatcctgagaatttttttcttctcagagggaaccatgaatgtgccagcatcaacagaatttatggattttatgatgaatgtaaaagaagatacaacattaaactatggaaaactttcacagactgttttaactgtttaccgatagcagccatcgtggatgagaagatattctgctgtcatggaggtttatcaccagatcttcaatctatggagcagattcggcgaattatgcgaccaactgatgtaccagatcaaggtcttctttgtgatcttttgtggtctgaccccgataaagatgtcttaggctggggtgaaaatgacagaggagtgtccttcacatttggtgcagaagtggttgcaaaatttctccataagcatgatttggatcttatatgtagagcccatcaggtggttgaagatggatatgaattttttgcaaagaggcagttggtcactctgttttctgcgcccaattattgcggagagtttgacaatgcaggtgccatgatgagtgtggatgaaacactaatgtgttcttttcagattttaaagcctgcagagaaaaagaagccaaatgccacgagacctgtaacgcctccaaggggtatgatcacaaagcaagcaaagaaatagatgtcgttttgacactgcctagtcgggacttgtaacatagagtatataaccttcatttttaagactgtaatgtgtactggtcagcttgctcagatagatctgtgtttgtgggggcccttccttccatttttgatttagtgaatggcatttgctggttataacagcaaatgaaagactcttcactccaaaaagaaaagtgttttgttttttaattctctgttccttttgcaaacaattttaatgatggtgttaaagctgtacaccccaggacagtttatcctgtctgaggagtaagtgtacaattgatcttttttaattcagtacaacccataatcatgtaaatgctcattttctttaggacataaagagagccctagggtgctctgaatctgtacatgttcttgtcataaaatgcatactgttgatacaaaccactgtgaacattttttatttgagaattttgtttcaaagggattgctttttcctctcattgtcttgttatgtacaaactagtttttatagctatcaacattaggagtaactttcaaccttgccagcatcactggtatgatgtatatttaattaaagcacacttttccccgaccgtatacttaaaatgacaaagccattcttttaaatatttgtgactctttcctaaagccaaagtttctgttgaattatgttttgacacacccctaagtacaaggtggtatggttgtatacacatgctgccttcttggggattcaaaaacaggtttttgattttgaatagcaattagtgatatagtgctgtttaagctactaacgataaaaggtaataacattttatacaatttccatatagtctattcattaagtaatctttttacagttgcatcaggcctgaacccgtccattcagaaagcttcaaattatagaaacaatactgttctatacgagtgaccgattatgctttctttggcctacattctttattctgcggtgaagttgaggcttataagttaaaacaaaggaactaacttactgtccaccagtttatacagaactcacagtacctatgacttttttaaactaagatctgttaaaaaagaaatctgtttcaacagatgaccgtgtacaataccgtgtggtgaaaatgaattcagacttattaaatgatgaacttgttaaatcttctcagtgtctatttatcagcacaatacacacaggagaactgttgatggcatattgaatagattttcctgaataaattgctctggaaaccacacaaaaaaaaaaaaaaa

SEQ ID NO: 93 - DNA, 8065 bp, Homo sapiens
acccaggagggctgtgctgatagcacgttcctcgagtttactttgctttccttgagtttattgtaaaggggtaaagttttcggatccgtcacgtgaccctgacaggtcctgcctatggcgcggcagaccacccacgccgagggccatggaactgcttaatagaaacaggcttgtaattgtgagtccgcgctgcactccgccgaaagcctccggcggcccagcgcgccggggtttttacactttccgttccttttgtaaagacggaggaggaggagaagaagaagaagaaaacggaggagaagaaaaagacgacaggggagacaaagagacccgcagcgacaaggcaagggggagacgagggaagactgggagaagacggaggagcggaggacgaggaaaggggggccagggaaaaaaaaggaattgatgtgaaatccaagcccagcgtccgcgccatcggcacccgcgctccgagcaggggttgacggccggctatggggaaggctactggccggaaagcgccgctgtggctgagagcgaagtttcagagactcttatttaaactgggttgttacattcaaaaaaactgcggcaagttcttggttgtgggcctcctcatatttggggccttcgcggtgggattaaaagcagcgaacctcgagaccaacgtggaggagctgtgggtggaagttggaggacgagtaagtcgtgaattaaattatactcgccagaagattggagaagaggctatgtttaatcctcaactcatgatacagacccctaaagaagaaggtgctaatgtcctgaccacagaagcgctcctacaacacctggactcggcactccaggccagccgtgtccatgtatacatgtacaacaggcagtggaaattggaacatttgtgttacaaatcaggagagcttatcacagaaacaggttacatggatcagataatagaatatctttacccttgtttgattattacacctttggactgcttctgggaaggggcgaaattacagtctgggacagcatacctcctaggtaaacctcctttgcggtggacaaacttcgaccctttggaattcctggaagagttaaagaaaataaactatcaagtggacagctgggaggaaatgctgaataaggctgaggttggtcatggttacatggaccgcccctgcctcaatccggccgatccagactgccccgccacagcccccaacaaaaattcaaccaaacctcttgatatggcccttgttttgaatggtggatgtcatggcttatccagaaagtatatgcactggcaggaggagttgattgtgggtggcacagtcaagaacagcactggaaaactcgtcagcgcccatgccctgcagaccatgttccagttaatgactcccaagcaaatgtacgagcacttcaaggggtacgagtatgtctcacacatcaactggaacgaggacaaagcggcagccatcctggaggcctggcagaggacatatgtggaggtggttcatcagagtgtcgcacagaactccactcaaaaggtgctttccttcaccaccacgaccctggacgacatcctgaaatccttctctgacgtcagtgtcatccgcgtggccagcggctacttactcatgctcgcctatgcctgtctaaccatgctgcgctgggactgctccaagtcccagggtgccgtggggctggctggcgtcctgctggttgcactgtcagtggctgcaggactgggcctgtgctcattgatcggaatttcctttaacgctgcaacaactcaggttttgccatttctcgctcttggtgttggtgtggatgatgtttttcttctggcccacgccttcagtgaaacaggacagaataaaagaatcccttttgaggacaggaccggggagtgcctgaagcgcacaggagccagcgtggccctcacgtccatcagcaatgtcacagccttcttcatggccgcgttaatcccaattcccgctctgcgggcgttctccctccaggcagcggtagtagtggtgttcaattttgccatggttctgctcatttttcctgcaattctcagcatggatttatatcgacgcgaggacaggagactggatattttctgctgttttacaagcccctgcgtcagcagagtgattcaggttgaacctcaggcctacaccgacacacacgacaatacccgctacagccccccacctccctacagcagccacagctttgcccatgaaacgcagattaccatgcagtccactgtccagctccgcacggagtacgacccccacacgcacgtgtactacaccaccgctgagccgcgctccgagatctctgtgcagcccgtcaccgtgacacaggacaccctcagctgccagagcccagagagcaccagctccacaagggacctgctctcccagttctccgactccagcctccactgcctcgagcccccctgtacgaagtggacactctcatcttttgctgagaagcactatgctcctttcctcttgaaaccaaaagccaaggtagtggtgatcttcctttttctgggcttgctgggggtcagcctttatggcaccacccgagtgagagacgggctggaccttacggacattgtacctcgggaaaccagagaatatgactttattgctgcacaattcaaatacttttctttctacaacatgtatatagtcacccagaaagcagactacccgaatatccagcacttactttacgacctacacaggagtttcagtaacgtgaagtatgtcatgttggaagaaaacaaacagcttcccaaaatgtggctgcactacttcagagactggcttcagggacttcaggatgcatttgacagtgactgggaaaccgggaaaatcatgccaaacaattacaagaatggatcagacgatggagtccttgcctacaaactcctggtgcaaaccggcagccgcgataagcccatcgacatcagccagttgactaaacagcgtctggtggatgcagatggcatcattaatcccagcgctttctacatctacctgacggcttgggtcagcaacgaccccgtcgcgtatgctgcctcccaggccaacatccggccacaccgaccagaatgggtccacgacaaagccgactacatgcctgaaacaaggctgagaatcccggcagcagagcccatcgagtatgcccagttccctttctacctcaacggcttgcgggacacctcagactttgtggaggcaattgaaaaagtaaggaccatctgcagcaactatacgagcctggggctgtccagttaccccaacggctaccccttcctcttctgggagcagtacatcggcctccgccactggctgctgctgttcatcagcgtggtgttggcctgcacattcctcgtgtgcgctgtcttccttctgaacccctggacggccgggatcattgtgatggtcctggcgctgatgacggtcgagctgttcggcatgatgggcctcatcggaatcaagctcagtgccgtgcccgtggtcatcctgatcgcttctgttggcataggagtggagttcaccgttcacgttgctttggcctttctgacggccatcggcgacaagaaccgcagggctgtgcttgccctggagcacatgtttgcacccgtcctggatggcgccgtgtccactctgctgggagtgctgatgctggcgggatctgagttcgacttcattgtcaggtatttctttgctgtgctggcgatcctcaccatcctcggcgttctcaatgggctggttttgcttcccgtgcttttgtctttctttggaccatatcctgaggtgtctccagccaacggcttgaaccgcctgcccacaccctcccctgagccaccccccagcgtggtccgcttcgccatgccgcccggccacacgcacagcgggtctgattcctccgactcggagtatagttcccagacgacagtgtcaggcctcagcgaggagcttcggcactacgaggcccagcagggcgcgggaggccctgcccaccaagtgatcgtggaagccacagaaaaccccgtcttcgcccactccactgtggtccatcccgaatccaggcatcacccaccctcgaacccgagacagcagccccacctggactcagggtccctgcctcccggacggcaaggccagcagccccgcagggacccccccagagaaggcttgtggccacccccctacagaccgcgcagagacgcttttgaaatttctactgaagggcattctggccctagcaatagggcccgctggggccctcgcggggcccgttctcacaaccctcggaacccagcgtccactgccatgggcagctccgtgcccggctactgccagcccatcaccactgtgacggcttctgcctccgtgactgtcgccgtgcacccgccgcctgtccctgggcctgggcggaacccccgagggggactctgcccaggctaccctgagactgaccacggcctgtttgaggacccccacgtgcctttccacgtccggtgtgagaggagggattcgaaggtggaagtcattgagctgcaggacgtggaatgcgaggagaggccccggggaagcagctccaactgagggtgattaaaatctgaagcaaagaggccaaagattggaaaccccccacccccacctctttccagaactgcttgaagagaactggttggagttatggaaaagatgccctgtgccaggacagcagttcattgttactgtaaccgattgtattattttgttaaatatttctataaatatttaagagatgtacacatgtgtaatataggaaggaaggatgtaaagtggtatgatctggggcttctccactcctgccccagagtgtggaggccacagtggggcctctccgtatttgtgcattgggctccgtgccacaaccaagcttcattagtcttaaatttcagcatatgttgctgctgcttaaatattgtataatttacttgtataattctatgcaaatattgcttatgtaataggattattttgtaaaggtttctgtttaaaatattttaaatttgcatatcacaaccctgtggtagtatgaaatgttactgttaactttcaaacacgctatgcgtgataatttttttgtttaatgagcagatatgaagaaagcacgttaatcctggtggcttctctaggtgtcgttgtgtgcggtcctcttgtttggctgtgcgtgtgaacacgtgtgtgagttcaccatgtactgtactgtgattttttttttgtcttgttttgtttctctacactgtctgtaacctgtagtaggctctgacctagtcaggctggaagcgtcaggatatcttttcttcgtgctggtgagggctggccctaaacatccacctaatcctttcaaatcagcccggcaaaagctagactctcctcgtgtctacggcatctcttatgatcattggctgccatccaggaccccaatttgtgcttcagggggataatctccttctctcggatcattgtgatggatgctggaacctcagggtatggagctcacatcagttcatcatggtgggtgttagagaattcggtgacatgcctagtgctgagccttggctgggccatgagagtctgtatactctaaaaagcatgcagcatggtgcccctcttctgaccaacacacacacgacccctcccccaacacccccaaattcaagagtggatgtggccctgtcacaggtagaaaaacctatttagttaattctttcttggcccacagtctcccagaaatgatgttttgagtccctatagtttaaactccctctcttaaatggagcagctggttgaggctttctagatctgtttgcatcttctttaaaactaagtggtgagcatgcattgtggtgtagaggcaggcattatgtaggataagagctccggggggattcttcatgcaccagtgtttagggtacgtgcttcctaagtaaatccaaacattgtctccatcctccccgtcattagtgctctttcaatgtgatgtgggaaagcaggaggatggacacaccccactgaaagatgtaggcaggggcaggtctctcaaccaggcatatttttaaaagttgcttctgtactggttctcttcttttgctctgaggtgtgggctccctcatctcgtaaccagagaccagcacatgtcagggaagcacccagtgtcggctccccatccaaatccacaccagcaccttgttacagacaagaagtcagaggaaagggcggggtccctgcagggctgaagcctaagctactgtgaggcgctcacgagtggcagctcctgttactcccttttaaattacctgggaaatcttaacagaaaggtaatgggcccccagaaatacccacagcatagtgacctcagaccctgatactcaccacaaaacttttaagatgctgattgggagccgcttgtggctgctgggtgtgtgtgtgtgtgtgtgcgtgcgtgcgtgtgtgtgtgtctctgctggggaccctggccacccccctgctgctgtcttggtgcctgtcacccacatggtctgccatcctaacacccagctctgctcagaaaacgtcctgcgtggaggagggatgatgcagaattctgaagtcgacttccctctggctcctggcgtgccctcgctcccttcctgagcccagctcgtgttgcgccggaggctgcgcggcccctgatttctgcatggtgtagaactttctccaatagtcacattggcaaagggagaactggggtgggcggggggtggggctggcagggaattagaatttctctctctcttttaatagttttattttgtctgtcctgtttgttcatttggatgttttaatttttaaaaaaaaaaaaactttgctgatatttataattttgtatcataagaatgttttcctctacagtatttgtcatgccagtttataacaaaaaaaaatgcagggattttatttctattggaaacattacagctatgttttacttttggacagaatttttatttgtatagagtgcttactaatgttaaatagttcagagtatataacatttacattaaggactcatggtaggttttagggtaaggagtttaaaggaaataaatattcaaactgggtctcattgccaattttggtggaaatgagtttgtgtcatttcaattacaaagataaaagtatgccatataatttatttatatgaagatttatttttgtagtgtacatagtagtcatcaagtcttttgacagaagtatatttttaaagaatttatatgtgatgaatccataatgtctggaactttgctgagacatgagtgggcacagttttcattgtaaattacagcaaggaaagaaaatgtttaacagtgttaagagagtcagagcagagtggatattcatgcgattatgaagtgtttattagttaccattggcgacctagcatgcttctcatttcaaaccttggaaggtgaaaatgtacaaactctctaaataattaatgttcaaacactgatagaaattctaacatgaataaaaaataatataacttgttggttatatctttgtttgtagaatgctttttttctttaaaatacttgggagagacagttagtgttggagccatcagaaactgttgtttcatcttgctgaccttgtgacactcttcttttttgctctatctgatggagagagttttaggttttcctcctttttgttttgtataaatagtgggtataagcatagctctgttacatggatgtattacaaagtgggggctgagcttttagtgtgatcatcacccaaatagtgtacattgtacccattaattaatttcttatcacctgaccctatttttgttttctcataccaagaaacttcctaagttaaccatcaaaattagtccttctgtcatctctcttagcatacttatttcccttatgtgatgcctaataatgagggaacataaataaagccaaattcaaagataaaaaaaaaaaaaa

SEQ ID NO: 94 - DNA, 7911 bp, Homo sapiens
acccaggagggctgtgctgatagcacgttcctcgagtttactttgctttccttgagtttattgtaaaggggtaaagttttcggatccgtcacgtgaccctgacaggtcctgcctatggcgcggcagaccacccacgccgagggccatggaactgcttaatagaaacaggcttgtaattgtgagtccgcgctgcactccgccgaaagcctccggcggcccagcgcgccggggtttttacactttccgttccttttgtaaagacggaggaggaggagaagaagaagaagaaaacggaggagaagaaaaagacgacaggggagacaaagagacccgcagcgacaaggggaaggctactggccggaaagcgccgctgtggctgagagcgaagtttcagagactcttatttaaactgggttgttacattcaaaaaaactgcggcaagttcttggttgtgggcctcctcatatttggggccttcgcggtgggattaaaagcagcgaacctcgagaccaacgtggaggagctgtgggtggaagttggaggacgagtaagtcgtgaattaaattatactcgccagaagattggagaagaggctatgtttaatcctcaactcatgatacagacccctaaagaagaaggtgctaatgtcctgaccacagaagcgctcctacaacacctggactcggcactccaggccagccgtgtccatgtatacatgtacaacaggcagtggaaattggaacatttgtgttacaaatcaggagagcttatcacagaaacaggttacatggatcagataatagaatatctttacccttgtttgattattacacctttggactgcttctgggaaggggcgaaattacagtctgggacagcatacctcctaggtaaacctcctttgcggtggacaaacttcgaccctttggaattcctggaagagttaaagaaaataaactatcaagtggacagctgggaggaaatgctgaataaggctgaggttggtcatggttacatggaccgcccctgcctcaatccggccgatccagactgccccgccacagcccccaacaaaaattcaaccaaacctcttgatatggcccttgttttgaatggtggatgtcatggcttatccagaaagtatatgcactggcaggaggagttgattgtgggtggcacagtcaagaacagcactggaaaactcgtcagcgcccatgccctgcagaccatgttccagttaatgactcccaagcaaatgtacgagcacttcaaggggtacgagtatgtctcacacatcaactggaacgaggacaaagcggcagccatcctggaggcctggcagaggacatatgtggaggtggttcatcagagtgtcgcacagaactccactcaaaaggtgctttccttcaccaccacgaccctggacgacatcctgaaatccttctctgacgtcagtgtcatccgcgtggccagcggctacttactcatgctcgcctatgcctgtctaaccatgctgcgctgggactgctccaagtcccagggtgccgtggggctggctggcgtcctgctggttgcactgtcagtggctgcaggactgggcctgtgctcattgatcggaatttcctttaacgctgcaacaactcaggttttgccatttctcgctcttggtgttggtgtggatgatgtttttcttctggcccacgccttcagtgaaacaggacagaataaaagaatcccttttgaggacaggaccggggagtgcctgaagcgcacaggagccagcgtggccctcacgtccatcagcaatgtcacagccttcttcatggccgcgttaatcccaattcccgctctgcgggcgttctccctccaggcagcggtagtagtggtgttcaattttgccatggttctgctcatttttcctgcaattctcagcatggatttatatcgacgcgaggacaggagactggatattttctgctgttttacaagcccctgcgtcagcagagtgattcaggttgaacctcaggcctacaccgacacacacgacaatacccgctacagccccccacctccctacagcagccacagctttgcccatgaaacgcagattaccatgcagtccactgtccagctccgcacggagtacgacccccacacgcacgtgtactacaccaccgctgagccgcgctccgagatctctgtgcagcccgtcaccgtgacacaggacaccctcagctgccagagcccagagagcaccagctccacaagggacctgctctcccagttctccgactccagcctccactgcctcgagcccccctgtacgaagtggacactctcatcttttgctgagaagcactatgctcctttcctcttgaaaccaaaagccaaggtagtggtgatcttcctttttctgggcttgctgggggtcagcctttatggcaccacccgagtgagagacgggctggaccttacggacattgtacctcgggaaaccagagaatatgactttattgctgcacaattcaaatacttttctttctacaacatgtatatagtcacccagaaagcagactacccgaatatccagcacttactttacgacctacacaggagtttcagtaacgtgaagtatgtcatgttggaagaaaacaaacagcttcccaaaatgtggctgcactacttcagagactggcttcagggacttcaggatgcatttgacagtgactgggaaaccgggaaaatcatgccaaacaattacaagaatggatcagacgatggagtccttgcctacaaactcctggtgcaaaccggcagccgcgataagcccatcgacatcagccagttgactaaacagcgtctggtggatgcagatggcatcattaatcccagcgctttctacatctacctgacggcttgggtcagcaacgaccccgtcgcgtatgctgcctcccaggccaacatccggccacaccgaccagaatgggtccacgacaaagccgactacatgcctgaaacaaggctgagaatcccggcagcagagcccatcgagtatgcccagttccctttctacctcaacggcttgcgggacacctcagactttgtggaggcaattgaaaaagtaaggaccatctgcagcaactatacgagcctggggctgtccagttaccccaacggctaccccttcctcttctgggagcagtacatcggcctccgccactggctgctgctgttcatcagcgtggtgttggcctgcacattcctcgtgtgcgctgtcttccttctgaacccctggacggccgggatcattgtgatggtcctggcgctgatgacggtcgagctgttcggcatgatgggcctcatcggaatcaagctcagtgccgtgcccgtggtcatcctgatcgcttctgttggcataggagtggagttcaccgttcacgttgctttggcctttctgacggccatcggcgacaagaaccgcagggctgtgcttgccctggagcacatgtttgcacccgtcctggatggcgccgtgtccactctgctgggagtgctgatgctggcgggatctgagttcgacttcattgtcaggtatttctttgctgtgctggcgatcctcaccatcctcggcgttctcaatgggctggttttgcttcccgtgcttttgtctttctttggaccatatcctgaggtgtctccagccaacggcttgaaccgcctgcccacaccctcccctgagccaccccccagcgtggtccgcttcgccatgccgcccggccacacgcacagcgggtctgattcctccgactcggagtatagttcccagacgacagtgtcaggcctcagcgaggagcttcggcactacgaggcccagcagggcgcgggaggccctgcccaccaagtgatcgtggaagccacagaaaaccccgtcttcgcccactccactgtggtccatcccgaatccaggcatcacccaccctcgaacccgagacagcagccccacctggactcagggtccctgcctcccggacggcaaggccagcagccccgcagggacccccccagagaaggcttgtggccacccccctacagaccgcgcagagacgcttttgaaatttctactgaagggcattctggccctagcaatagggcccgctggggccctcgcggggcccgttctcacaaccctcggaacccagcgtccactgccatgggcagctccgtgcccggctactgccagcccatcaccactgtgacggcttctgcctccgtgactgtcgccgtgcacccgccgcctgtccctgggcctgggcggaacccccgagggggactctgcccaggctaccctgagactgaccacggcctgtttgaggacccccacgtgcctttccacgtccggtgtgagaggagggattcgaaggtggaagtcattgagctgcaggacgtggaatgcgaggagaggccccggggaagcagctccaactgagggtgattaaaatctgaagcaaagaggccaaagattggaaaccccccacccccacctctttccagaactgcttgaagagaactggttggagttatggaaaagatgccctgtgccaggacagcagttcattgttactgtaaccgattgtattattttgttaaatatttctataaatatttaagagatgtacacatgtgtaatataggaaggaaggatgtaaagtggtatgatctggggcttctccactcctgccccagagtgtggaggccacagtggggcctctccgtatttgtgcattgggctccgtgccacaaccaagcttcattagtcttaaatttcagcatatgttgctgctgcttaaatattgtataatttacttgtataattctatgcaaatattgcttatgtaataggattattttgtaaaggtttctgtttaaaatattttaaatttgcatatcacaaccctgtggtagtatgaaatgttactgttaactttcaaacacgctatgcgtgataatttttttgtttaatgagcagatatgaagaaagcacgttaatcctggtggcttctctaggtgtcgttgtgtgcggtcctcttgtttggctgtgcgtgtgaacacgtgtgtgagttcaccatgtactgtactgtgattttttttttgtcttgttttgtttctctacactgtctgtaacctgtagtaggctctgacctagtcaggctggaagcgtcaggatatcttttcttcgtgctggtgagggctggccctaaacatccacctaatcctttcaaatcagcccggcaaaagctagactctcctcgtgtctacggcatctcttatgatcattggctgccatccaggaccccaatttgtgcttcagggggataatctccttctctcggatcattgtgatggatgctggaacctcagggtatggagctcacatcagttcatcatggtgggtgttagagaattcggtgacatgcctagtgctgagccttggctgggccatgagagtctgtatactctaaaaagcatgcagcatggtgcccctcttctgaccaacacacacacgacccctcccccaacacccccaaattcaagagtggatgtggccctgtcacaggtagaaaaacctatttagttaattctttcttggcccacagtctcccagaaatgatgttttgagtccctatagtttaaactccctctcttaaatggagcagctggttgaggctttctagatctgtttgcatcttctttaaaactaagtggtgagcatgcattgtggtgtagaggcaggcattatgtaggataagagctccggggggattcttcatgcaccagtgtttagggtacgtgcttcctaagtaaatccaaacattgtctccatcctccccgtcattagtgctctttcaatgtgatgtgggaaagcaggaggatggacacaccccactgaaagatgtaggcaggggcaggtctctcaaccaggcatatttttaaaagttgcttctgtactggttctcttcttttgctctgaggtgtgggctccctcatctcgtaaccagagaccagcacatgtcagggaagcacccagtgtcggctccccatccaaatccacaccagcaccttgttacagacaagaagtcagaggaaagggcggggtccctgcagggctgaagcctaagctactgtgaggcgctcacgagtggcagctcctgttactcccttttaaattacctgggaaatcttaacagaaaggtaatgggcccccagaaatacccacagcatagtgacctcagaccctgatactcaccacaaaacttttaagatgctgattgggagccgcttgtggctgctgggtgtgtgtgtgtgtgtgtgcgtgcgtgcgtgtgtgtgtgtctctgctggggaccctggccacccccctgctgctgtcttggtgcctgtcacccacatggtctgccatcctaacacccagctctgctcagaaaacgtcctgcgtggaggagggatgatgcagaattctgaagtcgacttccctctggctcctggcgtgccctcgctcccttcctgagcccagctcgtgttgcgccggaggctgcgcggcccctgatttctgcatggtgtagaactttctccaatagtcacattggcaaagggagaactggggtgggcggggggtggggctggcagggaattagaatttctctctctcttttaatagttttattttgtctgtcctgtttgttcatttggatgttttaatttttaaaaaaaaaaaaactttgctgatatttataattttgtatcataagaatgttttcctctacagtatttgtcatgccagtttataacaaaaaaaaatgcagggattttatttctattggaaacattacagctatgttttacttttggacagaatttttatttgtatagagtgcttactaatgttaaatagttcagagtatataacatttacattaaggactcatggtaggttttagggtaaggagtttaaaggaaataaatattcaaactgggtctcattgccaattttggtggaaatgagtttgtgtcatttcaattacaaagataaaagtatgccatataatttatttatatgaagatttatttttgtagtgtacatagtagtcatcaagtcttttgacagaagtatatttttaaagaatttatatgtgatgaatccataatgtctggaactttgctgagacatgagtgggcacagttttcattgtaaattacagcaaggaaagaaaatgtttaacagtgttaagagagtcagagcagagtggatattcatgcgattatgaagtgtttattagttaccattggcgacctagcatgcttctcatttcaaaccttggaaggtgaaaatgtacaaactctctaaataattaatgttcaaacactgatagaaattctaacatgaataaaaaataatataacttgttggttatatctttgtttgtagaatgctttttttctttaaaatacttgggagagacagttagtgttggagccatcagaaactgttgtttcatcttgctgaccttgtgacactcttcttttttgctctatctgatggagagagttttaggttttcctcctttttgttttgtataaatagtgggtataagcatagctctgttacatggatgtattacaaagtgggggctgagcttttagtgtgatcatcacccaaatagtgtacattgtacccattaattaatttcttatcacctgaccctatttttgttttctcataccaagaaacttcctaagttaaccatcaaaattagtccttctgtcatctctcttagcatacttatttcccttatgtgatgcctaataatgagggaacataaataaagccaaattcaaagataaaaaaaaaaaaaa

SEQ ID NO: 95 - DNA, 7675 bp, Homo sapiens
actcacacctctccaggaaaagcagcagacaaatggggattgaaaaattcaaaccctccctctggtcctgggaggaaagggctgtctgaggtccgcagggggtggaggggaaggctactggccggaaagcgccgctgtggctgagagcgaagtttcagagactcttatttaaactgggttgttacattcaaaaaaactgcggcaagttcttggttgtgggcctcctcatatttggggccttcgcggtgggattaaaagcagcgaacctcgagaccaacgtggaggagctgtgggtggaagttggaggacgagtaagtcgtgaattaaattatactcgccagaagattggagaagaggctatgtttaatcctcaactcatgatacagacccctaaagaagaaggtgctaatgtcctgaccacagaagcgctcctacaacacctggactcggcactccaggccagccgtgtccatgtatacatgtacaacaggcagtggaaattggaacatttgtgttacaaatcaggagagcttatcacagaaacaggttacatggatcagataatagaatatctttacccttgtttgattattacacctttggactgcttctgggaaggggcgaaattacagtctgggacagcatacctcctaggtaaacctcctttgcggtggacaaacttcgaccctttggaattcctggaagagttaaagaaaataaactatcaagtggacagctgggaggaaatgctgaataaggctgaggttggtcatggttacatggaccgcccctgcctcaatccggccgatccagactgccccgccacagcccccaacaaaaattcaaccaaacctcttgatatggcccttgttttgaatggtggatgtcatggcttatccagaaagtatatgcactggcaggaggagttgattgtgggtggcacagtcaagaacagcactggaaaactcgtcagcgcccatgccctgcagaccatgttccagttaatgactcccaagcaaatgtacgagcacttcaaggggtacgagtatgtctcacacatcaactggaacgaggacaaagcggcagccatcctggaggcctggcagaggacatatgtggaggtggttcatcagagtgtcgcacagaactccactcaaaaggtgctttccttcaccaccacgaccctggacgacatcctgaaatccttctctgacgtcagtgtcatccgcgtggccagcggctacttactcatgctcgcctatgcctgtctaaccatgctgcgctgggactgctccaagtcccagggtgccgtggggctggctggcgtcctgctggttgcactgtcagtggctgcaggactgggcctgtgctcattgatcggaatttcctttaacgctgcaacaactcaggttttgccatttctcgctcttggtgttggtgtggatgatgtttttcttctggcccacgccttcagtgaaacaggacagaataaaagaatcccttttgaggacaggaccggggagtgcctgaagcgcacaggagccagcgtggccctcacgtccatcagcaatgtcacagccttcttcatggccgcgttaatcccaattcccgctctgcgggcgttctccctccaggcagcggtagtagtggtgttcaattttgccatggttctgctcatttttcctgcaattctcagcatggatttatatcgacgcgaggacaggagactggatattttctgctgttttacaagcccctgcgtcagcagagtgattcaggttgaacctcaggcctacaccgacacacacgacaatacccgctacagccccccacctccctacagcagccacagctttgcccatgaaacgcagattaccatgcagtccactgtccagctccgcacggagtacgacccccacacgcacgtgtactacaccaccgctgagccgcgctccgagatctctgtgcagcccgtcaccgtgacacaggacaccctcagctgccagagcccagagagcaccagctccacaagggacctgctctcccagttctccgactccagcctccactgcctcgagcccccctgtacgaagtggacactctcatcttttgctgagaagcactatgctcctttcctcttgaaaccaaaagccaaggtagtggtgatcttcctttttctgggcttgctgggggtcagcctttatggcaccacccgagtgagagacgggctggaccttacggacattgtacctcgggaaaccagagaatatgactttattgctgcacaattcaaatacttttctttctacaacatgtatatagtcacccagaaagcagactacccgaatatccagcacttactttacgacctacacaggagtttcagtaacgtgaagtatgtcatgttggaagaaaacaaacagcttcccaaaatgtggctgcactacttcagagactggcttcagggacttcaggatgcatttgacagtgactgggaaaccgggaaaatcatgccaaacaattacaagaatggatcagacgatggagtccttgcctacaaactcctggtgcaaaccggcagccgcgataagcccatcgacatcagccagttgactaaacagcgtctggtggatgcagatggcatcattaatcccagcgctttctacatctacctgacggcttgggtcagcaacgaccccgtcgcgtatgctgcctcccaggccaacatccggccacaccgaccagaatgggtccacgacaaagccgactacatgcctgaaacaaggctgagaatcccggcagcagagcccatcgagtatgcccagttccctttctacctcaacggcttgcgggacacctcagactttgtggaggcaattgaaaaagtaaggaccatctgcagcaactatacgagcctggggctgtccagttaccccaacggctaccccttcctcttctgggagcagtacatcggcctccgccactggctgctgctgttcatcagcgtggtgttggcctgcacattcctcgtgtgcgctgtcttccttctgaacccctggacggccgggatcattgtgatggtcctggcgctgatgacggtcgagctgttcggcatgatgggcctcatcggaatcaagctcagtgccgtgcccgtggtcatcctgatcgcttctgttggcataggagtggagttcaccgttcacgttgctttggcctttctgacggccatcggcgacaagaaccgcagggctgtgcttgccctggagcacatgtttgcacccgtcctggatggcgccgtgtccactctgctgggagtgctgatgctggcgggatctgagttcgacttcattgtcaggtatttctttgctgtgctggcgatcctcaccatcctcggcgttctcaatgggctggttttgcttcccgtgcttttgtctttctttggaccatatcctgaggtgtctccagccaacggcttgaaccgcctgcccacaccctcccctgagccaccccccagcgtggtccgcttcgccatgccgcccggccacacgcacagcgggtctgattcctccgactcggagtatagttcccagacgacagtgtcaggcctcagcgaggagcttcggcactacgaggcccagcagggcgcgggaggccctgcccaccaagtgatcgtggaagccacagaaaaccccgtcttcgcccactccactgtggtccatcccgaatccaggcatcacccaccctcgaacccgagacagcagccccacctggactcagggtccctgcctcccggacggcaaggccagcagccccgcagggacccccccagagaaggcttgtggccacccccctacagaccgcgcagagacgcttttgaaatttctactgaagggcattctggccctagcaatagggcccgctggggccctcgcggggcccgttctcacaaccctcggaacccagcgtccactgccatgggcagctccgtgcccggctactgccagcccatcaccactgtgacggcttctgcctccgtgactgtcgccgtgcacccgccgcctgtccctgggcctgggcggaacccccgagggggactctgcccaggctaccctgagactgaccacggcctgtttgaggacccccacgtgcctttccacgtccggtgtgagaggagggattcgaaggtggaagtcattgagctgcaggacgtggaatgcgaggagaggccccggggaagcagctccaactgagggtgattaaaatctgaagcaaagaggccaaagattggaaaccccccacccccacctctttccagaactgcttgaagagaactggttggagttatggaaaagatgccctgtgccaggacagcagttcattgttactgtaaccgattgtattattttgttaaatatttctataaatatttaagagatgtacacatgtgtaatataggaaggaaggatgtaaagtggtatgatctggggcttctccactcctgccccagagtgtggaggccacagtggggcctctccgtatttgtgcattgggctccgtgccacaaccaagcttcattagtcttaaatttcagcatatgttgctgctgcttaaatattgtataatttacttgtataattctatgcaaatattgcttatgtaataggattattttgtaaaggtttctgtttaaaatattttaaatttgcatatcacaaccctgtggtagtatgaaatgttactgttaactttcaaacacgctatgcgtgataatttttttgtttaatgagcagatatgaagaaagcacgttaatcctggtggcttctctaggtgtcgttgtgtgcggtcctcttgtttggctgtgcgtgtgaacacgtgtgtgagttcaccatgtactgtactgtgattttttttttgtcttgttttgtttctctacactgtctgtaacctgtagtaggctctgacctagtcaggctggaagcgtcaggatatcttttcttcgtgctggtgagggctggccctaaacatccacctaatcctttcaaatcagcccggcaaaagctagactctcctcgtgtctacggcatctcttatgatcattggctgccatccaggaccccaatttgtgcttcagggggataatctccttctctcggatcattgtgatggatgctggaacctcagggtatggagctcacatcagttcatcatggtgggtgttagagaattcggtgacatgcctagtgctgagccttggctgggccatgagagtctgtatactctaaaaagcatgcagcatggtgcccctcttctgaccaacacacacacgacccctcccccaacacccccaaattcaagagtggatgtggccctgtcacaggtagaaaaacctatttagttaattctttcttggcccacagtctcccagaaatgatgttttgagtccctatagtttaaactccctctcttaaatggagcagctggttgaggctttctagatctgtttgcatcttctttaaaactaagtggtgagcatgcattgtggtgtagaggcaggcattatgtaggataagagctccggggggattcttcatgcaccagtgtttagggtacgtgcttcctaagtaaatccaaacattgtctccatcctccccgtcattagtgctctttcaatgtgatgtgggaaagcaggaggatggacacaccccactgaaagatgtaggcaggggcaggtctctcaaccaggcatatttttaaaagttgcttctgtactggttctcttcttttgctctgaggtgtgggctccctcatctcgtaaccagagaccagcacatgtcagggaagcacccagtgtcggctccccatccaaatccacaccagcaccttgttacagacaagaagtcagaggaaagggcggggtccctgcagggctgaagcctaagctactgtgaggcgctcacgagtggcagctcctgttactcccttttaaattacctgggaaatcttaacagaaaggtaatgggcccccagaaatacccacagcatagtgacctcagaccctgatactcaccacaaaacttttaagatgctgattgggagccgcttgtggctgctgggtgtgtgtgtgtgtgtgtgcgtgcgtgcgtgtgtgtgtgtctctgctggggaccctggccacccccctgctgctgtcttggtgcctgtcacccacatggtctgccatcctaacacccagctctgctcagaaaacgtcctgcgtggaggagggatgatgcagaattctgaagtcgacttccctctggctcctggcgtgccctcgctcccttcctgagcccagctcgtgttgcgccggaggctgcgcggcccctgatttctgcatggtgtagaactttctccaatagtcacattggcaaagggagaactggggtgggcggggggtggggctggcagggaattagaatttctctctctcttttaatagttttattttgtctgtcctgtttgttcatttggatgttttaatttttaaaaaaaaaaaaactttgctgatatttataattttgtatcataagaatgttttcctctacagtatttgtcatgccagtttataacaaaaaaaaatgcagggattttatttctattggaaacattacagctatgttttacttttggacagaatttttatttgtatagagtgcttactaatgttaaatagttcagagtatataacatttacattaaggactcatggtaggttttagggtaaggagtttaaaggaaataaatattcaaactgggtctcattgccaattttggtggaaatgagtttgtgtcatttcaattacaaagataaaagtatgccatataatttatttatatgaagatttatttttgtagtgtacatagtagtcatcaagtcttttgacagaagtatatttttaaagaatttatatgtgatgaatccataatgtctggaactttgctgagacatgagtgggcacagttttcattgtaaattacagcaaggaaagaaaatgtttaacagtgttaagagagtcagagcagagtggatattcatgcgattatgaagtgtttattagttaccattggcgacctagcatgcttctcatttcaaaccttggaaggtgaaaatgtacaaactctctaaataattaatgttcaaacactgatagaaattctaacatgaataaaaaataatataacttgttggttatatctttgtttgtagaatgctttttttctttaaaatacttgggagagacagttagtgttggagccatcagaaactgttgtttcatcttgctgaccttgtgacactcttcttttttgctctatctgatggagagagttttaggttttcctcctttttgttttgtataaatagtgggtataagcatagctctgttacatggatgtattacaaagtgggggctgagcttttagtgtgatcatcacccaaatagtgtacattgtacccattaattaatttcttatcacctgaccctatttttgttttctcataccaagaaacttcctaagttaaccatcaaaattagtccttctgtcatctctcttagcatacttatttcccttatgtgatgcctaataatgagggaacataaataaagccaaattcaaagataaaaaaaaaaaaaa

SEQ ID NO: 96 - DNA, 7658 bp, Homo sapiens
actcacacctctccaggaaaagcagcagacaaatggggattgaaaaattcaaaccctccctctggtcctgggaggaaagggctgtctgaggggaaggctactggccggaaagcgccgctgtggctgagagcgaagtttcagagactcttatttaaactgggttgttacattcaaaaaaactgcggcaagttcttggttgtgggcctcctcatatttggggccttcgcggtgggattaaaagcagcgaacctcgagaccaacgtggaggagctgtgggtggaagttggaggacgagtaagtcgtgaattaaattatactcgccagaagattggagaagaggctatgtttaatcctcaactcatgatacagacccctaaagaagaaggtgctaatgtcctgaccacagaagcgctcctacaacacctggactcggcactccaggccagccgtgtccatgtatacatgtacaacaggcagtggaaattggaacatttgtgttacaaatcaggagagcttatcacagaaacaggttacatggatcagataatagaatatctttacccttgtttgattattacacctttggactgcttctgggaaggggcgaaattacagtctgggacagcatacctcctaggtaaacctcctttgcggtggacaaacttcgaccctttggaattcctggaagagttaaagaaaataaactatcaagtggacagctgggaggaaatgctgaataaggctgaggttggtcatggttacatggaccgcccctgcctcaatccggccgatccagactgccccgccacagcccccaacaaaaattcaaccaaacctcttgatatggcccttgttttgaatggtggatgtcatggcttatccagaaagtatatgcactggcaggaggagttgattgtgggtggcacagtcaagaacagcactggaaaactcgtcagcgcccatgccctgcagaccatgttccagttaatgactcccaagcaaatgtacgagcacttcaaggggtacgagtatgtctcacacatcaactggaacgaggacaaagcggcagccatcctggaggcctggcagaggacatatgtggaggtggttcatcagagtgtcgcacagaactccactcaaaaggtgctttccttcaccaccacgaccctggacgacatcctgaaatccttctctgacgtcagtgtcatccgcgtggccagcggctacttactcatgctcgcctatgcctgtctaaccatgctgcgctgggactgctccaagtcccagggtgccgtggggctggctggcgtcctgctggttgcactgtcagtggctgcaggactgggcctgtgctcattgatcggaatttcctttaacgctgcaacaactcaggttttgccatttctcgctcttggtgttggtgtggatgatgtttttcttctggcccacgccttcagtgaaacaggacagaataaaagaatcccttttgaggacaggaccggggagtgcctgaagcgcacaggagccagcgtggccctcacgtccatcagcaatgtcacagccttcttcatggccgcgttaatcccaattcccgctctgcgggcgttctccctccaggcagcggtagtagtggtgttcaattttgccatggttctgctcatttttcctgcaattctcagcatggatttatatcgacgcgaggacaggagactggatattttctgctgttttacaagcccctgcgtcagcagagtgattcaggttgaacctcaggcctacaccgacacacacgacaatacccgctacagccccccacctccctacagcagccacagctttgcccatgaaacgcagattaccatgcagtccactgtccagctccgcacggagtacgacccccacacgcacgtgtactacaccaccgctgagccgcgctccgagatctctgtgcagcccgtcaccgtgacacaggacaccctcagctgccagagcccagagagcaccagctccacaagggacctgctctcccagttctccgactccagcctccactgcctcgagcccccctgtacgaagtggacactctcatcttttgctgagaagcactatgctcctttcctcttgaaaccaaaagccaaggtagtggtgatcttcctttttctgggcttgctgggggtcagcctttatggcaccacccgagtgagagacgggctggaccttacggacattgtacctcgggaaaccagagaatatgactttattgctgcacaattcaaatacttttctttctacaacatgtatatagtcacccagaaagcagactacccgaatatccagcacttactttacgacctacacaggagtttcagtaacgtgaagtatgtcatgttggaagaaaacaaacagcttcccaaaatgtggctgcactacttcagagactggcttcagggacttcaggatgcatttgacagtgactgggaaaccgggaaaatcatgccaaacaattacaagaatggatcagacgatggagtccttgcctacaaactcctggtgcaaaccggcagccgcgataagcccatcgacatcagccagttgactaaacagcgtctggtggatgcagatggcatcattaatcccagcgctttctacatctacctgacggcttgggtcagcaacgaccccgtcgcgtatgctgcctcccaggccaacatccggccacaccgaccagaatgggtccacgacaaagccgactacatgcctgaaacaaggctgagaatcccggcagcagagcccatcgagtatgcccagttccctttctacctcaacggcttgcgggacacctcagactttgtggaggcaattgaaaaagtaaggaccatctgcagcaactatacgagcctggggctgtccagttaccccaacggctaccccttcctcttctgggagcagtacatcggcctccgccactggctgctgctgttcatcagcgtggtgttggcctgcacattcctcgtgtgcgctgtcttccttctgaacccctggacggccgggatcattgtgatggtcctggcgctgatgacggtcgagctgttcggcatgatgggcctcatcggaatcaagctcagtgccgtgcccgtggtcatcctgatcgcttctgttggcataggagtggagttcaccgttcacgttgctttggcctttctgacggccatcggcgacaagaaccgcagggctgtgcttgccctggagcacatgtttgcacccgtcctggatggcgccgtgtccactctgctgggagtgctgatgctggcgggatctgagttcgacttcattgtcaggtatttctttgctgtgctggcgatcctcaccatcctcggcgttctcaatgggctggttttgcttcccgtgcttttgtctttctttggaccatatcctgaggtgtctccagccaacggcttgaaccgcctgcccacaccctcccctgagccaccccccagcgtggtccgcttcgccatgccgcccggccacacgcacagcgggtctgattcctccgactcggagtatagttcccagacgacagtgtcaggcctcagcgaggagcttcggcactacgaggcccagcagggcgcgggaggccctgcccaccaagtgatcgtggaagccacagaaaaccccgtcttcgcccactccactgtggtccatcccgaatccaggcatcacccaccctcgaacccgagacagcagccccacctggactcagggtccctgcctcccggacggcaaggccagcagccccgcagggacccccccagagaaggcttgtggccacccccctacagaccgcgcagagacgcttttgaaatttctactgaagggcattctggccctagcaatagggcccgctggggccctcgcggggcccgttctcacaaccctcggaacccagcgtccactgccatgggcagctccgtgcccggctactgccagcccatcaccactgtgacggcttctgcctccgtgactgtcgccgtgcacccgccgcctgtccctgggcctgggcggaacccccgagggggactctgcccaggctaccctgagactgaccacggcctgtttgaggacccccacgtgcctttccacgtccggtgtgagaggagggattcgaaggtggaagtcattgagctgcaggacgtggaatgcgaggagaggccccggggaagcagctccaactgagggtgattaaaatctgaagcaaagaggccaaagattggaaaccccccacccccacctctttccagaactgcttgaagagaactggttggagttatggaaaagatgccctgtgccaggacagcagttcattgttactgtaaccgattgtattattttgttaaatatttctataaatatttaagagatgtacacatgtgtaatataggaaggaaggatgtaaagtggtatgatctggggcttctccactcctgccccagagtgtggaggccacagtggggcctctccgtatttgtgcattgggctccgtgccacaaccaagcttcattagtcttaaatttcagcatatgttgctgctgcttaaatattgtataatttacttgtataattctatgcaaatattgcttatgtaataggattattttgtaaaggtttctgtttaaaatattttaaatttgcatatcacaaccctgtggtagtatgaaatgttactgttaactttcaaacacgctatgcgtgataatttttttgtttaatgagcagatatgaagaaagcacgttaatcctggtggcttctctaggtgtcgttgtgtgcggtcctcttgtttggctgtgcgtgtgaacacgtgtgtgagttcaccatgtactgtactgtgattttttttttgtcttgttttgtttctctacactgtctgtaacctgtagtaggctctgacctagtcaggctggaagcgtcaggatatcttttcttcgtgctggtgagggctggccctaaacatccacctaatcctttcaaatcagcccggcaaaagctagactctcctcgtgtctacggcatctcttatgatcattggctgccatccaggaccccaatttgtgcttcagggggataatctccttctctcggatcattgtgatggatgctggaacctcagggtatggagctcacatcagttcatcatggtgggtgttagagaattcggtgacatgcctagtgctgagccttggctgggccatgagagtctgtatactctaaaaagcatgcagcatggtgcccctcttctgaccaacacacacacgacccctcccccaacacccccaaattcaagagtggatgtggccctgtcacaggtagaaaaacctatttagttaattctttcttggcccacagtctcccagaaatgatgttttgagtccctatagtttaaactccctctcttaaatggagcagctggttgaggctttctagatctgtttgcatcttctttaaaactaagtggtgagcatgcattgtggtgtagaggcaggcattatgtaggataagagctccggggggattcttcatgcaccagtgtttagggtacgtgcttcctaagtaaatccaaacattgtctccatcctccccgtcattagtgctctttcaatgtgatgtgggaaagcaggaggatggacacaccccactgaaagatgtaggcaggggcaggtctctcaaccaggcatatttttaaaagttgcttctgtactggttctcttcttttgctctgaggtgtgggctccctcatctcgtaaccagagaccagcacatgtcagggaagcacccagtgtcggctccccatccaaatccacaccagcaccttgttacagacaagaagtcagaggaaagggcggggtccctgcagggctgaagcctaagctactgtgaggcgctcacgagtggcagctcctgttactcccttttaaattacctgggaaatcttaacagaaaggtaatgggcccccagaaatacccacagcatagtgacctcagaccctgatactcaccacaaaacttttaagatgctgattgggagccgcttgtggctgctgggtgtgtgtgtgtgtgtgtgcgtgcgtgcgtgtgtgtgtgtctctgctggggaccctggccacccccctgctgctgtcttggtgcctgtcacccacatggtctgccatcctaacacccagctctgctcagaaaacgtcctgcgtggaggagggatgatgcagaattctgaagtcgacttccctctggctcctggcgtgccctcgctcccttcctgagcccagctcgtgttgcgccggaggctgcgcggcccctgatttctgcatggtgtagaactttctccaatagtcacattggcaaagggagaactggggtgggcggggggtggggctggcagggaattagaatttctctctctcttttaatagttttattttgtctgtcctgtttgttcatttggatgttttaatttttaaaaaaaaaaaaactttgctgatatttataattttgtatcataagaatgttttcctctacagtatttgtcatgccagtttataacaaaaaaaaatgcagggattttatttctattggaaacattacagctatgttttacttttggacagaatttttatttgtatagagtgcttactaatgttaaatagttcagagtatataacatttacattaaggactcatggtaggttttagggtaaggagtttaaaggaaataaatattcaaactgggtctcattgccaattttggtggaaatgagtttgtgtcatttcaattacaaagataaaagtatgccatataatttatttatatgaagatttatttttgtagtgtacatagtagtcatcaagtcttttgacagaagtatatttttaaagaatttatatgtgatgaatccataatgtctggaactttgctgagacatgagtgggcacagttttcattgtaaattacagcaaggaaagaaaatgtttaacagtgttaagagagtcagagcagagtggatattcatgcgattatgaagtgtttattagttaccattggcgacctagcatgcttctcatttcaaaccttggaaggtgaaaatgtacaaactctctaaataattaatgttcaaacactgatagaaattctaacatgaataaaaaataatataacttgttggttatatctttgtttgtagaatgctttttttctttaaaatacttgggagagacagttagtgttggagccatcagaaactgttgtttcatcttgctgaccttgtgacactcttcttttttgctctatctgatggagagagttttaggttttcctcctttttgttttgtataaatagtgggtataagcatagctctgttacatggatgtattacaaagtgggggctgagcttttagtgtgatcatcacccaaatagtgtacattgtacccattaattaatttcttatcacctgaccctatttttgttttctcataccaagaaacttcctaagttaaccatcaaaattagtccttctgtcatctctcttagcatacttatttcccttatgtgatgcctaataatgagggaacataaataaagccaaattcaaagataaaaaaaaaaaaaa

SEQ ID NO: 97 - DNA, 7757 bp, Homo sapiens
gaaggcgagcacccagacgggggcccgccggggccgcggccagcgccggggaaatgccgcgccggggagcagcctgcgccggcctgagcccttccctttgcactcggctgttttttacgtttaaccagaaaggaagggagaggagggaaagatccatgtggctgccctcttccgatcacaaatattgtcgggaaggctactggccggaaagcgccgctgtggctgagagcgaagtttcagagactcttatttaaactgggttgttacattcaaaaaaactgcggcaagttcttggttgtgggcctcctcatatttggggccttcgcggtgggattaaaagcagcgaacctcgagaccaacgtggaggagctgtgggtggaagttggaggacgagtaagtcgtgaattaaattatactcgccagaagattggagaagaggctatgtttaatcctcaactcatgatacagacccctaaagaagaaggtgctaatgtcctgaccacagaagcgctcctacaacacctggactcggcactccaggccagccgtgtccatgtatacatgtacaacaggcagtggaaattggaacatttgtgttacaaatcaggagagcttatcacagaaacaggttacatggatcagataatagaatatctttacccttgtttgattattacacctttggactgcttctgggaaggggcgaaattacagtctgggacagcatacctcctaggtaaacctcctttgcggtggacaaacttcgaccctttggaattcctggaagagttaaagaaaataaactatcaagtggacagctgggaggaaatgctgaataaggctgaggttggtcatggttacatggaccgcccctgcctcaatccggccgatccagactgccccgccacagcccccaacaaaaattcaaccaaacctcttgatatggcccttgttttgaatggtggatgtcatggcttatccagaaagtatatgcactggcaggaggagttgattgtgggtggcacagtcaagaacagcactggaaaactcgtcagcgcccatgccctgcagaccatgttccagttaatgactcccaagcaaatgtacgagcacttcaaggggtacgagtatgtctcacacatcaactggaacgaggacaaagcggcagccatcctggaggcctggcagaggacatatgtggaggtggttcatcagagtgtcgcacagaactccactcaaaaggtgctttccttcaccaccacgaccctggacgacatcctgaaatccttctctgacgtcagtgtcatccgcgtggccagcggctacttactcatgctcgcctatgcctgtctaaccatgctgcgctgggactgctccaagtcccagggtgccgtggggctggctggcgtcctgctggttgcactgtcagtggctgcaggactgggcctgtgctcattgatcggaatttcctttaacgctgcaacaactcaggttttgccatttctcgctcttggtgttggtgtggatgatgtttttcttctggcccacgccttcagtgaaacaggacagaataaaagaatcccttttgaggacaggaccggggagtgcctgaagcgcacaggagccagcgtggccctcacgtccatcagcaatgtcacagccttcttcatggccgcgttaatcccaattcccgctctgcgggcgttctccctccaggcagcggtagtagtggtgttcaattttgccatggttctgctcatttttcctgcaattctcagcatggatttatatcgacgcgaggacaggagactggatattttctgctgttttacaagcccctgcgtcagcagagtgattcaggttgaacctcaggcctacaccgacacacacgacaatacccgctacagccccccacctccctacagcagccacagctttgcccatgaaacgcagattaccatgcagtccactgtccagctccgcacggagtacgacccccacacgcacgtgtactacaccaccgctgagccgcgctccgagatctctgtgcagcccgtcaccgtgacacaggacaccctcagctgccagagcccagagagcaccagctccacaagggacctgctctcccagttctccgactccagcctccactgcctcgagcccccctgtacgaagtggacactctcatcttttgctgagaagcactatgctcctttcctcttgaaaccaaaagccaaggtagtggtgatcttcctttttctgggcttgctgggggtcagcctttatggcaccacccgagtgagagacgggctggaccttacggacattgtacctcgggaaaccagagaatatgactttattgctgcacaattcaaatacttttctttctacaacatgtatatagtcacccagaaagcagactacccgaatatccagcacttactttacgacctacacaggagtttcagtaacgtgaagtatgtcatgttggaagaaaacaaacagcttcccaaaatgtggctgcactacttcagagactggcttcagggacttcaggatgcatttgacagtgactgggaaaccgggaaaatcatgccaaacaattacaagaatggatcagacgatggagtccttgcctacaaactcctggtgcaaaccggcagccgcgataagcccatcgacatcagccagttgactaaacagcgtctggtggatgcagatggcatcattaatcccagcgctttctacatctacctgacggcttgggtcagcaacgaccccgtcgcgtatgctgcctcccaggccaacatccggccacaccgaccagaatgggtccacgacaaagccgactacatgcctgaaacaaggctgagaatcccggcagcagagcccatcgagtatgcccagttccctttctacctcaacggcttgcgggacacctcagactttgtggaggcaattgaaaaagtaaggaccatctgcagcaactatacgagcctggggctgtccagttaccccaacggctaccccttcctcttctgggagcagtacatcggcctccgccactggctgctgctgttcatcagcgtggtgttggcctgcacattcctcgtgtgcgctgtcttccttctgaacccctggacggccgggatcattgtgatggtcctggcgctgatgacggtcgagctgttcggcatgatgggcctcatcggaatcaagctcagtgccgtgcccgtggtcatcctgatcgcttctgttggcataggagtggagttcaccgttcacgttgctttggcctttctgacggccatcggcgacaagaaccgcagggctgtgcttgccctggagcacatgtttgcacccgtcctggatggcgccgtgtccactctgctgggagtgctgatgctggcgggatctgagttcgacttcattgtcaggtatttctttgctgtgctggcgatcctcaccatcctcggcgttctcaatgggctggttttgcttcccgtgcttttgtctttctttggaccatatcctgaggtgtctccagccaacggcttgaaccgcctgcccacaccctcccctgagccaccccccagcgtggtccgcttcgccatgccgcccggccacacgcacagcgggtctgattcctccgactcggagtatagttcccagacgacagtgtcaggcctcagcgaggagcttcggcactacgaggcccagcagggcgcgggaggccctgcccaccaagtgatcgtggaagccacagaaaaccccgtcttcgcccactccactgtggtccatcccgaatccaggcatcacccaccctcgaacccgagacagcagccccacctggactcagggtccctgcctcccggacggcaaggccagcagccccgcagggacccccccagagaaggcttgtggccacccccctacagaccgcgcagagacgcttttgaaatttctactgaagggcattctggccctagcaatagggcccgctggggccctcgcggggcccgttctcacaaccctcggaacccagcgtccactgccatgggcagctccgtgcccggctactgccagcccatcaccactgtgacggcttctgcctccgtgactgtcgccgtgcacccgccgcctgtccctgggcctgggcggaacccccgagggggactctgcccaggctaccctgagactgaccacggcctgtttgaggacccccacgtgcctttccacgtccggtgtgagaggagggattcgaaggtggaagtcattgagctgcaggacgtggaatgcgaggagaggccccggggaagcagctccaactgagggtgattaaaatctgaagcaaagaggccaaagattggaaaccccccacccccacctctttccagaactgcttgaagagaactggttggagttatggaaaagatgccctgtgccaggacagcagttcattgttactgtaaccgattgtattattttgttaaatatttctataaatatttaagagatgtacacatgtgtaatataggaaggaaggatgtaaagtggtatgatctggggcttctccactcctgccccagagtgtggaggccacagtggggcctctccgtatttgtgcattgggctccgtgccacaaccaagcttcattagtcttaaatttcagcatatgttgctgctgcttaaatattgtataatttacttgtataattctatgcaaatattgcttatgtaataggattattttgtaaaggtttctgtttaaaatattttaaatttgcatatcacaaccctgtggtagtatgaaatgttactgttaactttcaaacacgctatgcgtgataatttttttgtttaatgagcagatatgaagaaagcacgttaatcctggtggcttctctaggtgtcgttgtgtgcggtcctcttgtttggctgtgcgtgtgaacacgtgtgtgagttcaccatgtactgtactgtgattttttttttgtcttgttttgtttctctacactgtctgtaacctgtagtaggctctgacctagtcaggctggaagcgtcaggatatcttttcttcgtgctggtgagggctggccctaaacatccacctaatcctttcaaatcagcccggcaaaagctagactctcctcgtgtctacggcatctcttatgatcattggctgccatccaggaccccaatttgtgcttcagggggataatctccttctctcggatcattgtgatggatgctggaacctcagggtatggagctcacatcagttcatcatggtgggtgttagagaattcggtgacatgcctagtgctgagccttggctgggccatgagagtctgtatactctaaaaagcatgcagcatggtgcccctcttctgaccaacacacacacgacccctcccccaacacccccaaattcaagagtggatgtggccctgtcacaggtagaaaaacctatttagttaattctttcttggcccacagtctcccagaaatgatgttttgagtccctatagtttaaactccctctcttaaatggagcagctggttgaggctttctagatctgtttgcatcttctttaaaactaagtggtgagcatgcattgtggtgtagaggcaggcattatgtaggataagagctccggggggattcttcatgcaccagtgtttagggtacgtgcttcctaagtaaatccaaacattgtctccatcctccccgtcattagtgctctttcaatgtgatgtgggaaagcaggaggatggacacaccccactgaaagatgtaggcaggggcaggtctctcaaccaggcatatttttaaaagttgcttctgtactggttctcttcttttgctctgaggtgtgggctccctcatctcgtaaccagagaccagcacatgtcagggaagcacccagtgtcggctccccatccaaatccacaccagcaccttgttacagacaagaagtcagaggaaagggcggggtccctgcagggctgaagcctaagctactgtgaggcgctcacgagtggcagctcctgttactcccttttaaattacctgggaaatcttaacagaaaggtaatgggcccccagaaatacccacagcatagtgacctcagaccctgatactcaccacaaaacttttaagatgctgattgggagccgcttgtggctgctgggtgtgtgtgtgtgtgtgtgcgtgcgtgcgtgtgtgtgtgtctctgctggggaccctggccacccccctgctgctgtcttggtgcctgtcacccacatggtctgccatcctaacacccagctctgctcagaaaacgtcctgcgtggaggagggatgatgcagaattctgaagtcgacttccctctggctcctggcgtgccctcgctcccttcctgagcccagctcgtgttgcgccggaggctgcgcggcccctgatttctgcatggtgtagaactttctccaatagtcacattggcaaagggagaactggggtgggcggggggtggggctggcagggaattagaatttctctctctcttttaatagttttattttgtctgtcctgtttgttcatttggatgttttaatttttaaaaaaaaaaaaactttgctgatatttataattttgtatcataagaatgttttcctctacagtatttgtcatgccagtttataacaaaaaaaaatgcagggattttatttctattggaaacattacagctatgttttacttttggacagaatttttatttgtatagagtgcttactaatgttaaatagttcagagtatataacatttacattaaggactcatggtaggttttagggtaaggagtttaaaggaaataaatattcaaactgggtctcattgccaattttggtggaaatgagtttgtgtcatttcaattacaaagataaaagtatgccatataatttatttatatgaagatttatttttgtagtgtacatagtagtcatcaagtcttttgacagaagtatatttttaaagaatttatatgtgatgaatccataatgtctggaactttgctgagacatgagtgggcacagttttcattgtaaattacagcaaggaaagaaaatgtttaacagtgttaagagagtcagagcagagtggatattcatgcgattatgaagtgtttattagttaccattggcgacctagcatgcttctcatttcaaaccttggaaggtgaaaatgtacaaactctctaaataattaatgttcaaacactgatagaaattctaacatgaataaaaaataatataacttgttggttatatctttgtttgtagaatgctttttttctttaaaatacttgggagagacagttagtgttggagccatcagaaactgttgtttcatcttgctgaccttgtgacactcttcttttttgctctatctgatggagagagttttaggttttcctcctttttgttttgtataaatagtgggtataagcatagctctgttacatggatgtattacaaagtgggggctgagcttttagtgtgatcatcacccaaatagtgtacattgtacccattaattaatttcttatcacctgaccctatttttgttttctcataccaagaaacttcctaagttaaccatcaaaattagtccttctgtcatctctcttagcatacttatttcccttatgtgatgcctaataatgagggaacataaataaagccaaattcaaagataaaaaaaaaaaaaa

SEQ ID NO: 98 - DNA, 7831 bp, Homo sapiens
aattcagctcacacagcctctccccacgctatggaaatgcgtcgggagtgaactccggcggccgcgctcaccacgtggatccccacttactaccattctcggcgggggtccagttgggggaacccgcaatatgttgttccaaagagcgctcgcccctagcgcccgtccccgagggtgatggacagagcaggactggtttgctggctcctgaaccttgggctccatcgctgggattacgcagcccctcccttctcagctctggggggaaggctactggccggaaagcgccgctgtggctgagagcgaagtttcagagactcttatttaaactgggttgttacattcaaaaaaactgcggcaagttcttggttgtgggcctcctcatatttggggccttcgcggtgggattaaaagcagcgaacctcgagaccaacgtggaggagctgtgggtggaagttggaggacgagtaagtcgtgaattaaattatactcgccagaagattggagaagaggctatgtttaatcctcaactcatgatacagacccctaaagaagaaggtgctaatgtcctgaccacagaagcgctcctacaacacctggactcggcactccaggccagccgtgtccatgtatacatgtacaacaggcagtggaaattggaacatttgtgttacaaatcaggagagcttatcacagaaacaggttacatggatcagataatagaatatctttacccttgtttgattattacacctttggactgcttctgggaaggggcgaaattacagtctgggacagcatacctcctaggtaaacctcctttgcggtggacaaacttcgaccctttggaattcctggaagagttaaagaaaataaactatcaagtggacagctgggaggaaatgctgaataaggctgaggttggtcatggttacatggaccgcccctgcctcaatccggccgatccagactgccccgccacagcccccaacaaaaattcaaccaaacctcttgatatggcccttgttttgaatggtggatgtcatggcttatccagaaagtatatgcactggcaggaggagttgattgtgggtggcacagtcaagaacagcactggaaaactcgtcagcgcccatgccctgcagaccatgttccagttaatgactcccaagcaaatgtacgagcacttcaaggggtacgagtatgtctcacacatcaactggaacgaggacaaagcggcagccatcctggaggcctggcagaggacatatgtggaggtggttcatcagagtgtcgcacagaactccactcaaaaggtgctttccttcaccaccacgaccctggacgacatcctgaaatccttctctgacgtcagtgtcatccgcgtggccagcggctacttactcatgctcgcctatgcctgtctaaccatgctgcgctgggactgctccaagtcccagggtgccgtggggctggctggcgtcctgctggttgcactgtcagtggctgcaggactgggcctgtgctcattgatcggaatttcctttaacgctgcaacaactcaggttttgccatttctcgctcttggtgttggtgtggatgatgtttttcttctggcccacgccttcagtgaaacaggacagaataaaagaatcccttttgaggacaggaccggggagtgcctgaagcgcacaggagccagcgtggccctcacgtccatcagcaatgtcacagccttcttcatggccgcgttaatcccaattcccgctctgcgggcgttctccctccaggcagcggtagtagtggtgttcaattttgccatggttctgctcatttttcctgcaattctcagcatggatttatatcgacgcgaggacaggagactggatattttctgctgttttacaagcccctgcgtcagcagagtgattcaggttgaacctcaggcctacaccgacacacacgacaatacccgctacagccccccacctccctacagcagccacagctttgcccatgaaacgcagattaccatgcagtccactgtccagctccgcacggagtacgacccccacacgcacgtgtactacaccaccgctgagccgcgctccgagatctctgtgcagcccgtcaccgtgacacaggacaccctcagctgccagagcccagagagcaccagctccacaagggacctgctctcccagttctccgactccagcctccactgcctcgagcccccctgtacgaagtggacactctcatcttttgctgagaagcactatgctcctttcctcttgaaaccaaaagccaaggtagtggtgatcttcctttttctgggcttgctgggggtcagcctttatggcaccacccgagtgagagacgggctggaccttacggacattgtacctcgggaaaccagagaatatgactttattgctgcacaattcaaatacttttctttctacaacatgtatatagtcacccagaaagcagactacccgaatatccagcacttactttacgacctacacaggagtttcagtaacgtgaagtatgtcatgttggaagaaaacaaacagcttcccaaaatgtggctgcactacttcagagactggcttcagggacttcaggatgcatttgacagtgactgggaaaccgggaaaatcatgccaaacaattacaagaatggatcagacgatggagtccttgcctacaaactcctggtgcaaaccggcagccgcgataagcccatcgacatcagccagttgactaaacagcgtctggtggatgcagatggcatcattaatcccagcgctttctacatctacctgacggcttgggtcagcaacgaccccgtcgcgtatgctgcctcccaggccaacatccggccacaccgaccagaatgggtccacgacaaagccgactacatgcctgaaacaaggctgagaatcccggcagcagagcccatcgagtatgcccagttccctttctacctcaacggcttgcgggacacctcagactttgtggaggcaattgaaaaagtaaggaccatctgcagcaactatacgagcctggggctgtccagttaccccaacggctaccccttcctcttctgggagcagtacatcggcctccgccactggctgctgctgttcatcagcgtggtgttggcctgcacattcctcgtgtgcgctgtcttccttctgaacccctggacggccgggatcattgtgatggtcctggcgctgatgacggtcgagctgttcggcatgatgggcctcatcggaatcaagctcagtgccgtgcccgtggtcatcctgatcgcttctgttggcataggagtggagttcaccgttcacgttgctttggcctttctgacggccatcggcgacaagaaccgcagggctgtgcttgccctggagcacatgtttgcacccgtcctggatggcgccgtgtccactctgctgggagtgctgatgctggcgggatctgagttcgacttcattgtcaggtatttctttgctgtgctggcgatcctcaccatcctcggcgttctcaatgggctggttttgcttcccgtgcttttgtctttctttggaccatatcctgaggtgtctccagccaacggcttgaaccgcctgcccacaccctcccctgagccaccccccagcgtggtccgcttcgccatgccgcccggccacacgcacagcgggtctgattcctccgactcggagtatagttcccagacgacagtgtcaggcctcagcgaggagcttcggcactacgaggcccagcagggcgcgggaggccctgcccaccaagtgatcgtggaagccacagaaaaccccgtcttcgcccactccactgtggtccatcccgaatccaggcatcacccaccctcgaacccgagacagcagccccacctggactcagggtccctgcctcccggacggcaaggccagcagccccgcagggacccccccagagaaggcttgtggccacccccctacagaccgcgcagagacgcttttgaaatttctactgaagggcattctggccctagcaatagggcccgctggggccctcgcggggcccgttctcacaaccctcggaacccagcgtccactgccatgggcagctccgtgcccggctactgccagcccatcaccactgtgacggcttctgcctccgtgactgtcgccgtgcacccgccgcctgtccctgggcctgggcggaacccccgagggggactctgcccaggctaccctgagactgaccacggcctgtttgaggacccccacgtgcctttccacgtccggtgtgagaggagggattcgaaggtggaagtcattgagctgcaggacgtggaatgcgaggagaggccccggggaagcagctccaactgagggtgattaaaatctgaagcaaagaggccaaagattggaaaccccccacccccacctctttccagaactgcttgaagagaactggttggagttatggaaaagatgccctgtgccaggacagcagttcattgttactgtaaccgattgtattattttgttaaatatttctataaatatttaagagatgtacacatgtgtaatataggaaggaaggatgtaaagtggtatgatctggggcttctccactcctgccccagagtgtggaggccacagtggggcctctccgtatttgtgcattgggctccgtgccacaaccaagcttcattagtcttaaatttcagcatatgttgctgctgcttaaatattgtataatttacttgtataattctatgcaaatattgcttatgtaataggattattttgtaaaggtttctgtttaaaatattttaaatttgcatatcacaaccctgtggtagtatgaaatgttactgttaactttcaaacacgctatgcgtgataatttttttgtttaatgagcagatatgaagaaagcacgttaatcctggtggcttctctaggtgtcgttgtgtgcggtcctcttgtttggctgtgcgtgtgaacacgtgtgtgagttcaccatgtactgtactgtgattttttttttgtcttgttttgtttctctacactgtctgtaacctgtagtaggctctgacctagtcaggctggaagcgtcaggatatcttttcttcgtgctggtgagggctggccctaaacatccacctaatcctttcaaatcagcccggcaaaagctagactctcctcgtgtctacggcatctcttatgatcattggctgccatccaggaccccaatttgtgcttcagggggataatctccttctctcggatcattgtgatggatgctggaacctcagggtatggagctcacatcagttcatcatggtgggtgttagagaattcggtgacatgcctagtgctgagccttggctgggccatgagagtctgtatactctaaaaagcatgcagcatggtgcccctcttctgaccaacacacacacgacccctcccccaacacccccaaattcaagagtggatgtggccctgtcacaggtagaaaaacctatttagttaattctttcttggcccacagtctcccagaaatgatgttttgagtccctatagtttaaactccctctcttaaatggagcagctggttgaggctttctagatctgtttgcatcttctttaaaactaagtggtgagcatgcattgtggtgtagaggcaggcattatgtaggataagagctccggggggattcttcatgcaccagtgtttagggtacgtgcttcctaagtaaatccaaacattgtctccatcctccccgtcattagtgctctttcaatgtgatgtgggaaagcaggaggatggacacaccccactgaaagatgtaggcaggggcaggtctctcaaccaggcatatttttaaaagttgcttctgtactggttctcttcttttgctctgaggtgtgggctccctcatctcgtaaccagagaccagcacatgtcagggaagcacccagtgtcggctccccatccaaatccacaccagcaccttgttacagacaagaagtcagaggaaagggcggggtccctgcagggctgaagcctaagctactgtgaggcgctcacgagtggcagctcctgttactcccttttaaattacctgggaaatcttaacagaaaggtaatgggcccccagaaatacccacagcatagtgacctcagaccctgatactcaccacaaaacttttaagatgctgattgggagccgcttgtggctgctgggtgtgtgtgtgtgtgtgtgcgtgcgtgcgtgtgtgtgtgtctctgctggggaccctggccacccccctgctgctgtcttggtgcctgtcacccacatggtctgccatcctaacacccagctctgctcagaaaacgtcctgcgtggaggagggatgatgcagaattctgaagtcgacttccctctggctcctggcgtgccctcgctcccttcctgagcccagctcgtgttgcgccggaggctgcgcggcccctgatttctgcatggtgtagaactttctccaatagtcacattggcaaagggagaactggggtgggcggggggtggggctggcagggaattagaatttctctctctcttttaatagttttattttgtctgtcctgtttgttcatttggatgttttaatttttaaaaaaaaaaaaactttgctgatatttataattttgtatcataagaatgttttcctctacagtatttgtcatgccagtttataacaaaaaaaaatgcagggattttatttctattggaaacattacagctatgttttacttttggacagaatttttatttgtatagagtgcttactaatgttaaatagttcagagtatataacatttacattaaggactcatggtaggttttagggtaaggagtttaaaggaaataaatattcaaactgggtctcattgccaattttggtggaaatgagtttgtgtcatttcaattacaaagataaaagtatgccatataatttatttatatgaagatttatttttgtagtgtacatagtagtcatcaagtcttttgacagaagtatatttttaaagaatttatatgtgatgaatccataatgtctggaactttgctgagacatgagtgggcacagttttcattgtaaattacagcaaggaaagaaaatgtttaacagtgttaagagagtcagagcagagtggatattcatgcgattatgaagtgtttattagttaccattggcgacctagcatgcttctcatttcaaaccttggaaggtgaaaatgtacaaactctctaaataattaatgttcaaacactgatagaaattctaacatgaataaaaaataatataacttgttggttatatctttgtttgtagaatgctttttttctttaaaatacttgggagagacagttagtgttggagccatcagaaactgttgtttcatcttgctgaccttgtgacactcttcttttttgctctatctgatggagagagttttaggttttcctcctttttgttttgtataaatagtgggtataagcatagctctgttacatggatgtattacaaagtgggggctgagcttttagtgtgatcatcacccaaatagtgtacattgtacccattaattaatttcttatcacctgaccctatttttgttttctcataccaagaaacttcctaagttaaccatcaaaattagtccttctgtcatctctcttagcatacttatttcccttatgtgatgcctaataatgagggaacataaataaagccaaattcaaagataaaaaaaaaaaaaa

SEQ ID NO: 99 - DNA, 4748 bp, Homo sapiens
gcagttcccgcctcctcaggtccgggcgggtccctggccggggtagcacggaagggtctcccaggcggcgtagtagggcttccgtgttactggaaacctacttccggctgcaaatgggaaaaggagcctctaccttaaccaatccccgggaacctcaggcccgcggatgggagaaaccagagatgccaacttcctgcttccgaagtagtggctgggtcttaaagcaccgatgtttctgcattgaatagccctggaagacagaattcttgtctctccaaagatctggcagacttattcccaattataagagatccttgcaaaggaggtgtcttgcttcaccttcaccttccactgtgattgtaagttttctgaggcctcgccagccatgcggaactgaataggactagcaacttcatagacggttgtgaagacaagctagacggcagatgaaagttcttggcacagagtgaacacttgataaactatatggcagggagggctggaacggggcttgtttgaagagcaatatgagccagggttatagacctgagtttggggtaagagtggaacatccaaatggaagagtccagcagctgaaaggacatttgttcaaaggcctttttcattacagttttctccttcttctgatccagccacagcctccggagccgttgcacacctacctgcccggccgacttacctgtacttgccgccgtcccggctcacctggcggtgcccgaggagtagtcgctggagtccgcgcctccctgggactgcaatgtgccgatcttagctgctgcctgagaggatgtctggggtgtccgagcccctgagtcgagtaaagttgggcacgttacgccggcctgaaggccctgcagagcccatggtggtggtaccagtagatgtggaaaaggaggacgtgcgtatcctcaaggtctgcttctatagcaacagcttcaatcctgggaaaaacttcaaactggtcaaatgcactgtccagacggagatccgggagatcatcacctccatcctgctgagcgggcggatcgggcccaacatccggttggctgagtgctatgggctgaggctgaagcacatgaagtccgatgagatccactggctgcacccacagatgacggtgggtgaggtgcaggacaagtatgagtgtctgcacgtggaagccgagtggaggtatgaccttcaaatccgctacttgccagaagacttcatggagagcctgaaggaggacaggaccacgctgctctatttttaccaacagctccggaacgactacatgcagcgctacgccagcaaggtcagcgagggcatggccctgcagctgggctgcctggagctcaggcggttcttcaaggatatgccccacaatgcacttgacaagaagtccaacttcgagctcctagaaaaggaagtggggctggacttgtttttcccaaagcagatgcaggagaacttaaagcccaaacagttccggaagatgatccagcagaccttccagcagtacgcctcgctcagggaggaggagtgcgtcatgaagttcttcaacactctcgccggcttcgccaacatcgaccaggagacctaccgctgtgaactcattcaaggatggaacattactgtggacctggtcattggccctaaagggatccgccagctgactagtcaggacgcaaagcccacctgcctggccgagttcaagcagatcaggtccatcaggtgcctcccgctggaggagggccaggcagtacttcagctgggcattgaaggtgccccccaggccttgtccatcaaaacctcatccctagcagaggctgagaacatggctgacctcatagacggctactgccggctgcagggtgagcaccaaggctctctcatcatccatcctaggaaagatggtgagaagcggaacagcctgccccagatccccatgctaaacctggaggcccggcggtcccacctctcagagagctgcagcatagagtcagacatctacgcagagattcccgacgaaaccctgcgaaggcccggaggtccacagtatggcattgcccgtgaagatgtggtcctgaatcgtattcttggggaaggcttttttggggaggtctatgaaggtgtctacacaaatcacaaaggggagaaaatcaatgtagctgtcaagacctgcaagaaagactgcactctggacaacaaggagaagttcatgagcgaggcagtgatcatgaagaacctcgaccacccgcacatcgtgaagctgatcggcatcattgaagaggagcccacctggatcatcatggaattgtatccctatggggagctgggccactacctggagcggaacaagaactccctgaaggtgctcaccctcgtgctgtactcactgcagatatgcaaagccatggcctacctggagagcatcaactgcgtgcacagggacattgctgtccggaacatcctggtggcctcccctgagtgtgtgaagctgggggactttggtctttcccggtacattgaggacgaggactattacaaagcctctgtgactcgtctccccatcaaatggatgtccccagagtccattaacttccgacgcttcacgacagccagtgacgtctggatgttcgccgtgtgcatgtgggagatcctgagctttgggaagcagcccttcttctggctggagaacaaggatgtcatcggggtgctggagaaaggagaccggctgcccaagcctgatctctgtccaccggtcctttataccctcatgacccgctgctgggactacgaccccagtgaccggccccgcttcaccgagctggtgtgcagcctcagtgacgtttatcagatggagaaggacattgccatggagcaagagaggaatgctcgctaccgaacccccaaaatcttggagcccacagccttccaggaacccccacccaagcccagccgacctaagtacagaccccctccgcaaaccaacctcctggctccaaagctgcagttccaggttcctgagggtctgtgtgccagctctcctacgctcaccagccctatggagtatccatctcccgttaactcactgcacaccccacctctccaccggcacaatgtcttcaaacgccacagcatgcgggaggaggacttcatccaacccagcagccgagaagaggcccagcagctgtgggaggctgaaaaggtcaaaatgcggcaaatcctggacaaacagcagaagcagatggtggaggactaccagtggctcaggcaggaggagaagtccctggaccccatggtttatatgaatgataagtccccattgacgccagagaaggaggtcggctacctggagttcacagggcccccacagaagcccccgaggctgggcgcacagtccatccagcccacagctaacctggaccggactgatgacctggtgtacctcaatgtcatggagctggtgcgggccgtgctggagctcaagaatgagctctgtcagctgccccccgagggctacgtggtggtggtgaagaatgtggggctgaccctgcggaagctcatcgggagcgtggatgatctcctgccttccttgccgtcatcttcacggacagagatcgagggcacccagaaactgctcaacaaagacctggcagagctcatcaacaagatgcggctggcacagcagaacgccgtgacctccctaagtgaggagtgcaagaggcagatgctgacggcttcacacaccctggctgtggacgccaagaacctgctcgacgctgtggaccaggccaaggttctggccaatctggcccacccacctgcagagtgacggagggtgggggccacctgcctgcgtcttccgcccctgcctgccatgtacctcccctgccttgctgttggtcatgtgggtcttccagggggaaggccaaggggagtcaccttcccttgccactttgcacgacgccctctccccacccctacccctggctgtactgctcaggctgcagctggacagaggggactctgggctatggacacagggtgacggtgacaaagatggctcagagggggactgctgctgcctggccactgctccctaagccagcctggtccatgcagggggctcctgggggtggggaggtgtcacatggtgcccctagctttatatatggacatggcaggccgatttgggaaccaagctattcctttcccttcctcttcggccctcagatgtcccttgatgcacagagaagctggggaggagctttgttttgggggtcaggcagccagtgagatgagggatgggcctggcattcttgtacagtgtatattgaaatttatttaatgtgagtttggtctggactgacagcatgtgccctcctgagggaggacctggggcacagtccaggaacaagctaattgggagtccaggcacaggatgctgtgttgtcaacaaaccaagcatcagggggaagaagcagagagatgcggccaagataggaccttgggccaaatccgctctcttcctgcccctctttctctttcttcctttactttcccttgcttttccctcttttcttactcctcctctttctctccccaacccccattctcatctgcacccttcttttctcatgtgtttgcataaacattcttttaacttctttctatttgacttgtggttgaattaaaattgtcccatttgctttgcaaaaaaaaaaaaaaaaaaaaaaaaaaaa

SEQ ID NO: 100 - DNA, 3969 bp, Homo sapiens
ccacagcctccggagccgttgcacacctacctgcccggccgacttacctgtacttgccgccgtcccggctcacctggcggtgcccgaggagtagtcgctggagtccgcgcctccctgggactgcaatgtgccgatcttagctgctgcctgagaggatgtctggggtgtccgagcccctgagtcgagtaaagttgggcacgttacgccggcctgaaggccctgcagagcccatggtggtggtaccagtagatgtggaaaaggaggacgtgcgtatcctcaaggtctgcttctatagcaacagcttcaatcctgggaaaaacttcaaactggtcaaatgcactgtccagacggagatccgggagatcatcacctccatcctgctgagcgggcggatcgggcccaacatccggttggctgagtgctatgggctgaggctgaagcacatgaagtccgatgagatccactggctgcacccacagatgacggtgggtgaggtgcaggacaagtatgagtgtctgcacgtggaagccgagtggaggtatgaccttcaaatccgctacttgccagaagacttcatggagagcctgaaggaggacaggaccacgctgctctatttttaccaacagctccggaacgactacatgcagcgctacgccagcaaggtcagcgagggcatggccctgcagctgggctgcctggagctcaggcggttcttcaaggatatgccccacaatgcacttgacaagaagtccaacttcgagctcctagaaaaggaagtggggctggacttgtttttcccaaagcagatgcaggagaacttaaagcccaaacagttccggaagatgatccagcagaccttccagcagtacgcctcgctcagggaggaggagtgcgtcatgaagttcttcaacactctcgccggcttcgccaacatcgaccaggagacctaccgctgtgaactcattcaaggatggaacattactgtggacctggtcattggccctaaagggatccgccagctgactagtcaggacgcaaagcccacctgcctggccgagttcaagcagatcaggtccatcaggtgcctcccgctggaggagggccaggcagtacttcagctgggcattgaaggtgccccccaggccttgtccatcaaaacctcatccctagcagaggctgagaacatggctgacctcatagacggctactgccggctgcagggtgagcaccaaggctctctcatcatccatcctaggaaagatggtgagaagcggaacagcctgccccagatccccatgctaaacctggaggcccggcggtcccacctctcagagagctgcagcatagagtcagacatctacgcagagattcccgacgaaaccctgcgaaggcccggaggtccacagtatggcattgcccgtgaagatgtggtcctgaatcgtattcttggggaaggcttttttggggaggtctatgaaggtgtctacacaaatcacaaaggggagaaaatcaatgtagctgtcaagacctgcaagaaagactgcactctggacaacaaggagaagttcatgagcgaggcagtgatcatgaagaacctcgaccacccgcacatcgtgaagctgatcggcatcattgaagaggagcccacctggatcatcatggaattgtatccctatggggagctgggccactacctggagcggaacaagaactccctgaaggtgctcaccctcgtgctgtactcactgcagatatgcaaagccatggcctacctggagagcatcaactgcgtgcacagggacattgctgtccggaacatcctggtggcctcccctgagtgtgtgaagctgggggactttggtctttcccggtacattgaggacgaggactattacaaagcctctgtgactcgtctccccatcaaatggatgtccccagagtccattaacttccgacgcttcacgacagccagtgacgtctggatgttcgccgtgtgcatgtgggagatcctgagctttgggaagcagcccttcttctggctggagaacaaggatgtcatcggggtgctggagaaaggagaccggctgcccaagcctgatctctgtccaccggtcctttataccctcatgacccgctgctgggactacgaccccagtgaccggccccgcttcaccgagctggtgtgcagcctcagtgacgtttatcagatggagaaggacattgccatggagcaagagaggaatgctcgctaccgaacccccaaaatcttggagcccacagccttccaggaacccccacccaagcccagccgacctaagtacagaccccctccgcaaaccaacctcctggctccaaagctgcagttccaggaggaggacttcatccaacccagcagccgagaagaggcccagcagctgtgggaggctgaaaaggtcaaaatgcggcaaatcctggacaaacagcagaagcagatggtggaggactaccagtggctcaggcaggaggagaagtccctggaccccatggtttatatgaatgataagtccccattgacgccagagaaggaggtcggctacctggagttcacagggcccccacagaagcccccgaggctgggcgcacagtccatccagcccacagctaacctggaccggactgatgacctggtgtacctcaatgtcatggagctggtgcgggccgtgctggagctcaagaatgagctctgtcagctgccccccgagggctacgtggtggtggtgaagaatgtggggctgaccctgcggaagctcatcgggagcgtggatgatctcctgccttccttgccgtcatcttcacggacagagatcgagggcacccagaaactgctcaacaaagacctggcagagctcatcaacaagatgcggctggcacagcagaacgccgtgacctccctaagtgaggagtgcaagaggcagatgctgacggcttcacacaccctggctgtggacgccaagaacctgctcgacgctgtggaccaggccaaggttctggccaatctggcccacccacctgcagagtgacggagggtgggggccacctgcctgcgtcttccgcccctgcctgccatgtacctcccctgccttgctgttggtcatgtgggtcttccagggggaaggccaaggggagtcaccttcccttgccactttgcacgacgccctctccccacccctacccctggctgtactgctcaggctgcagctggacagaggggactctgggctatggacacagggtgacggtgacaaagatggctcagagggggactgctgctgcctggccactgctccctaagccagcctggtccatgcagggggctcctgggggtggggaggtgtcacatggtgcccctagctttatatatggacatggcaggccgatttgggaaccaagctattcctttcccttcctcttcggccctcagatgtcccttgatgcacagagaagctggggaggagctttgttttgggggtcaggcagccagtgagatgagggatgggcctggcattcttgtacagtgtatattgaaatttatttaatgtgagtttggtctggactgacagcatgtgccctcctgagggaggacctggggcacagtccaggaacaagctaattgggagtccaggcacaggatgctgtgttgtcaacaaaccaagcatcagggggaagaagcagagagatgcggccaagataggaccttgggccaaatccgctctcttcctgcccctctttctctttcttcctttactttcccttgcttttccctcttttcttactcctcctctttctctccccaacccccattctcatctgcacccttcttttctcatgtgtttgcataaacattcttttaacttctttctatttgacttgtggttgaattaaaattgtcccatttgctttgcaaaaaaaaaaaaaaaaaaaaaaaaaaaa

SEQ ID NO: 101 - DNA, 4180 bp, Homo sapiens
aaggaagtggggaggagagcagcaggggtgtggttaacaactcagaggaggagggagaatctaacctgtcagcccttttactcagccacagcctccggagccgttgcacacctacctgcccggccgacttacctgtacttgccgccgtcccggctcacctggcggtgcccgaggagtagtcgctggagtccgcgcctccctgggactgcaatgtgccgatcttagctgctgcctgagaggatgtctggggtgtccgagcccctgagtcgagtaaagttgggcacgttacgccggcctgaaggccctgcagagcccatggtggtggtaccagtagatgtggaaaaggaggacgtgcgtatcctcaaggtctgcttctatagcaacagcttcaatcctgggaaaaacttcaaactggtcaaatgcactgtccagacggagatccgggagatcatcacctccatcctgctgagcgggcggatcgggcccaacatccggttggctgagtgctatgggctgaggctgaagcacatgaagtccgatgagatccactggctgcacccacagatgacggtgggtgaggtgcaggacaagtatgagtgtctgcacgtggaagccgagtggaggtatgaccttcaaatccgctacttgccagaagacttcatggagagcctgaaggaggacaggaccacgctgctctatttttaccaacagctccggaacgactacatgcagcgctacgccagcaaggtcagcgagggcatggccctgcagctgggctgcctggagctcaggcggttcttcaaggatatgccccacaatgcacttgacaagaagtccaacttcgagctcctagaaaaggaagtggggctggacttgtttttcccaaagcagatgcaggagaacttaaagcccaaacagttccggaagatgatccagcagaccttccagcagtacgcctcgctcagggaggaggagtgcgtcatgaagttcttcaacactctcgccggcttcgccaacatcgaccaggagacctaccgctgtgaactcattcaaggatggaacattactgtggacctggtcattggccctaaagggatccgccagctgactagtcaggacgcaaagcccacctgcctggccgagttcaagcagatcaggtccatcaggtgcctcccgctggaggagggccaggcagtacttcagctgggcattgaaggtgccccccaggccttgtccatcaaaacctcatccctagcagaggctgagaacatggctgacctcatagacggctactgccggctgcagggtgagcaccaaggctctctcatcatccatcctaggaaagatggtgagaagcggaacagcctgccccagatccccatgctaaacctggaggcccggcggtcccacctctcagagagctgcagcatagagtcagacatctacgcagagattcccgacgaaaccctgcgaaggcccggaggtccacagtatggcattgcccgtgaagatgtggtcctgaatcgtattcttggggaaggcttttttggggaggtctatgaaggtgtctacacaaatcacaaaggggagaaaatcaatgtagctgtcaagacctgcaagaaagactgcactctggacaacaaggagaagttcatgagcgaggcagtgatcatgaagaacctcgaccacccgcacatcgtgaagctgatcggcatcattgaagaggagcccacctggatcatcatggaattgtatccctatggggagctgggccactacctggagcggaacaagaactccctgaaggtgctcaccctcgtgctgtactcactgcagatatgcaaagccatggcctacctggagagcatcaactgcgtgcacagggacattgctgtccggaacatcctggtggcctcccctgagtgtgtgaagctgggggactttggtctttcccggtacattgaggacgaggactattacaaagcctctgtgactcgtctccccatcaaatggatgtccccagagtccattaacttccgacgcttcacgacagccagtgacgtctggatgttcgccgtgtgcatgtgggagatcctgagctttgggaagcagcccttcttctggctggagaacaaggatgtcatcggggtgctggagaaaggagaccggctgcccaagcctgatctctgtccaccggtcctttataccctcatgacccgctgctgggactacgaccccagtgaccggccccgcttcaccgagctggtgtgcagcctcagtgacgtttatcagatggagaaggacattgccatggagcaagagaggaatgctcgctaccgaacccccaaaatcttggagcccacagccttccaggaacccccacccaagcccagccgacctaagtacagaccccctccgcaaaccaacctcctggctccaaagctgcagttccaggttcctgagggtctgtgtgccagctctcctacgctcaccagccctatggagtatccatctcccgttaactcactgcacaccccacctctccaccggcacaatgtcttcaaacgccacagcatgcgggaggaggacttcatccaacccagcagccgagaagaggcccagcagctgtgggaggctgaaaaggtcaaaatgcggcaaatcctggacaaacagcagaagcagatggtggaggactaccagtggctcaggcaggaggagaagtccctggaccccatggtttatatgaatgataagtccccattgacgccagagaaggaggtcggctacctggagttcacagggcccccacagaagcccccgaggctgggcgcacagtccatccagcccacagctaacctggaccggactgatgacctggtgtacctcaatgtcatggagctggtgcgggccgtgctggagctcaagaatgagctctgtcagctgccccccgagggctacgtggtggtggtgaagaatgtggggctgaccctgcggaagctcatcgggagcgtggatgatctcctgccttccttgccgtcatcttcacggacagagatcgagggcacccagaaactgctcaacaaagacctggcagagctcatcaacaagatgcggctggcacagcagaacgccgtgacctccctaagtgaggagtgcaagaggcagatgctgacggcttcacacaccctggctgtggacgccaagaacctgctcgacgctgtggaccaggccaaggttctggccaatctggcccacccacctgcagagtgacggagggtgggggccacctgcctgcgtcttccgcccctgcctgccatgtacctcccctgccttgctgttggtcatgtgggtcttccagggggaaggccaaggggagtcaccttcccttgccactttgcacgacgccctctccccacccctacccctggctgtactgctcaggctgcagctggacagaggggactctgggctatggacacagggtgacggtgacaaagatggctcagagggggactgctgctgcctggccactgctccctaagccagcctggtccatgcagggggctcctgggggtggggaggtgtcacatggtgcccctagctttatatatggacatggcaggccgatttgggaaccaagctattcctttcccttcctcttcggccctcagatgtcccttgatgcacagagaagctggggaggagctttgttttgggggtcaggcagccagtgagatgagggatgggcctggcattcttgtacagtgtatattgaaatttatttaatgtgagtttggtctggactgacagcatgtgccctcctgagggaggacctggggcacagtccaggaacaagctaattgggagtccaggcacaggatgctgtgttgtcaacaaaccaagcatcagggggaagaagcagagagatgcggccaagataggaccttgggccaaatccgctctcttcctgcccctctttctctttcttcctttactttcccttgcttttccctcttttcttactcctcctctttctctccccaacccccattctcatctgcacccttcttttctcatgtgtttgcataaacattcttttaacttctttctatttgacttgtggttgaattaaaattgtcccatttgctttgcaaaaaaaaaaaaaaaaaaaaaaaaaaaa

SEQ ID NO: 102 - DNA, 3657 bp, Homo sapiens
gctgtgtgcgcctgcgcggggcgccgagacagggcgtgttcgctgttcagtgccggtgttgcagggagtgagggcagctggagtgcgttctgccgaagcttgtggttgcacgcccatcgtcttaggggctaccttccgtgttaccttatcccatatcacacaactggtcctcagccataacaagctaacaatggtgccaccgaacatcgcagaactgaagaatttggaggtgctcaacttttttaataaccaaatcgaggagctgcccacacagatcagtagccttcagaaactcaaacacctgaaccttggcatgaacaggctgaacactttgccacgaggcttcggctccctgccagctcttgaggttctggacttgacgtacaacaacttgagcgaaaattctcttcctggaaacttcttctacctgaccaccctgcgtgcactctatctaagtgacaacgattttgaaatcctgccgccagatattgggaagctcacaaagttgcagatactcagccttagggataacgacctgatctcgctgcctaaggaaatcggggagcttacccagcttaaagagctccacattcaggggaaccgcctcaccgttctgcccccagaactaggaaacttggatttaactggccagaagcaggtattcaaagcagagaacaatccctgggtgacccccattgcagaccagttccagcttggcgtgtcccatgtttttgagtatatccgttctgagacatacaaatacctctacggcagacacatgcaggccaacccagaaccaccgaagaagaataatgacaaatcgaaaaagatcagccggaaacccctggcagccaagaacagataaggaagggattggcatcggctggccttccagcaccttctctctccaacacttcattctctcttgccctgtctctcaaataaacccaatgctgcgtgtgaggccttttttatttttcttttcactctctttctaatgcttcccaccttaccttttagattcttttgctaggtgggagattgttataaggtctttaaaccatttccatttgtttctttaacattaccaaaagcagggaacaaagctcttattcaactgcgaattccatagtgggctctggcttttcttgaatagatatcacaaggttgcttattatcaaaagaataattaaaatcatgtaaccatttaaatgtcactgttaacacttttcactctttctgttgattcacctaactcattattttgctttattaaaagtcttccttcaccaccgagatatgctaatttaacttacaaatgattttaataaaatcttgagtttgtatcacatgttacttattgactcagaataaaagaacagtctgatcttggggtataacacattttcatttacttttctcccccaaaatcatcttatccaattttattggttatacatgataaacttttcatgaaagaaatgcaaaattaaatcacagttcgtttcttctcacattaatttgtcaagttttttttttctttgaagactttctaaattaggaagcagaaaaacaaatctctaggagattctgccaaaggattttggaaagtagcattccttcgccgaagaaatggtgatttctgccaggggctggtagacaagaactgtgaaagagagagagaaaaaacctcaactgtgtattttgtcacggcggaaaatctgctcgcatcgaagcattcttctaagcgacttcgatgccaaggaagttgtgtaaatgtgcacgcgctacaccacacccagggtggaaaccacagttgcagagtcattaaacaatcaattgtttgtttaacatctgtgataggcagctttccttcttttcaacagtgatacctacgaaaatcaaaataaatgcaagctgaggttttgtgctcactgaaagggctgtcaaccccagaaggccgacacaaaaaaaatggtatgtgaagatgcaccgtcttttcaaatggcctgggagagtcaaatggcctgggagagggggcctgcccttctctgctgtgtcctttcggcttcccagttgagctcccaagaccaggacccactggggcatataaaatctctgctgtatcctttcggcttcccagttgagctcccaagaccaggacccactggggcatataaaaaagtcaaaaatcaaaatcaaacaacaagttctgagttacttaggaaacagacttcgcatttcaatcagagaggccacagagcaaggtctaaacttctggcttctagacaaattcctgatagaacatttaaatgtgggaagtggcttccccaggtcccatcccctgtttagggatagagttgatatcatttttataggtgccatgtatgcctctgcctgaatttttttaattgacttttgagcttttgagattgcacgagggagaacaaggcctttgctgttgtggataggaaagacttaacctaaaattaaaccagcaagaaagcattagtaaaaatctaacaatatgaagggctcttatgagtcatttttttcaaaagatgaaaactccagaaacgcacaggaacgaaatacctcccagaaacatgaagcaatcatcgaagactcactggtaatatttttaaaaagtatacagatcaaagcaaaaagaagccatgtgtaacaaagagaaatgtgcaaatattttttaaggcagtattaagtgcaagaggagtaacatgaaataaacattctttcacatggctactgggaatataaatttcgctccagaaaggccgtagcagtttgacgataggtggcaaaaccttaagattgtgtactggggcccagaatttttatttctaggaatgtatcctgaggaaattatccgagatccccacaaactgcaatgtttaggaattgtccttatagcattgcatacacaagaaaaacagagaaaagcctgatccctgtcagtggaaaaggggttcaatgaattacggtgtgtctgcatgaggcttttatgacattaaaaattgttgaacaacggccaggcacagtggctcatgcctgtaatcctaacactttgggaggccaaggtgggaagattgcctgagctcaggagtttgagaccagcctgggcaacacggtgaaaccccgtctctactaaaatacaaaaaattagccgggcgtcgcagcatgcgcctgtagtcccagctgctcaggaggctgaggcaggagaattgattgaacccgggaggcagaggttgcactgagctgagattaagccaccgcactccagcctgggcgacagagcaagattccgttcccaagaaaaaaaaattgttcaacaataagggcaaagggagagaatcataacatctgattaaacagaaaaagcaagatttttaaaactaactatataaggatggtcccagctgtgtcaaaaggaagcttgtttgtaatacgtgtgcataaaaattaaatagaggtgaacacaattattttaaggcagttaaattatctctgtattgtgaactaagactttctagaattttacttattcattctgtacttaaattttttctaatgaacacatatacttttgtaatcagaaaatattaaatgcatgtatttttcaaaaaaaaaaaaaaaaaa

SEQ ID NO: 103 - DNA, 2854 bp, Homo sapiens
ggggcctggtggccgcgcggcgctgctgggttctccgaggcgacctggccgccggccgctcctccgcgcgctgttccgcacttgctgccctcgcccggcccggagcgccgctgccatgcggctggcgctgctctgggccctggggctcctgggcgcgggcagccctctgccttcctggccgctcccaaatataggtggcactgaggagcagcaggcagagtcagagaaggccccgagggagcccttggagccccaggtccttcaggacgatctcccaattagcctcaaaaaggtgcttcagaccagtctgcctgagcccctgaggatcaagttggagctggacggtgacagtcatatcctggagctgctacagaatagggagttggtcccaggccgcccaaccctggtgtggtaccagcccgatggcactcgggtggtcagtgagggacacactttggagaactgctgctaccagggaagagtgcggggatatgcaggctcctgggtgtccatctgcacctgctctgggctcagaggcttggtggtcctgaccccagagagaagctataccctggagcaggggcctggggaccttcagggtcctcccattatttcgcgaatccaagatctccacctgccaggccacacctgtgccctgagctggcgggaatctgtacacactcagaagccaccagagcaccccctgggacagcgccacattcgccggaggcgggatgtggtaacagagaccaagactgtggagttggtgattgtggctgatcactcggaggcccagaaataccgggacttccagcacctgctaaaccgcacactggaagtggccctcttgctggacacattcttccggcccctgaatgtacgagtggcactagtgggcctggaggcctggacccagcgtgacctggtggagatcagcccaaacccagctgtcaccctcgaaaacttcctccactggcgcagggcacatttgctgcctcgattgccccatgacagtgcccagctggtgactggtacttcattctctgggcctacggtgggcatggccattcagaactccatctgttctcctgacttctcaggaggtgtgaacatggaccactccaccagcatcctgggagtcgcctcctccatagcccatgagttgggccacagcctgggcctggaccatgatttgcctgggaatagctgcccctgtccaggtccagccccagccaagacctgcatcatggaggcctccacagacttcctaccaggcctgaacttcagcaactgcagccgacgggccctggagaaagccctcctggatggaatgggcagctgcctcttcgaacggctgcctagcctaccccctatggctgctttctgcggaaatatgtttgtggagccgggcgagcagtgtgactgtggcttcctggatgactgcgtcgatccctgctgtgattctttgacctgccagctgaggccaggtgcacagtgtgcatctgacggaccctgttgtcaaaattgccagctgcgcccgtctggctggcagtgtcgtcctaccagaggggattgtgacttgcctgaattctgcccaggagacagctcccagtgtccccctgatgtcagcctaggggatggcgagccctgcgctggcgggcaagctgtgtgcatgcacgggcgttgtgcctcctatgcccagcagtgccagtcactttggggacctggagcccagcccgctgcgccactttgcctccagacagctaatactcggggaaatgcttttgggagctgtgggcgcaaccccagtggcagttatgtgtcctgcacccctagagatgccatttgtgggcagctccagtgccagacaggtaggacccagcctctgctgggctccatccgggatctactctgggagacaatagatgtgaatgggactgagctgaactgcagctgggtgcacctggacctgggcagtgatgtggcccagcccctcctgactctgcctggcacagcctgtggccctggcctggtgtgtatagaccatcgatgccagcgtgtggatctcctgggggcacaggaatgtcgaagcaaatgccatggacatggggtctgtgacagcaacaggcactgctactgtgaggagggctgggcaccccctgactgcaccactcagctcaaagcaaccagctccctgaccacagggctgctcctcagcctcctggtcttattggtcctggtgatgcttggtgccagctactggtaccgtgcccgcctgcaccagcgactctgccagctcaagggacccacctgccagtacaggctagtgctctcagcttcccggcccccccttccaggccgctgccgcctgaccctgtgtccaagagactccagtctcaggggccagccaagcccccacccccaaggaagccactgcctgccgacccccagggccggtgcccatcgggtgacctgcccggcccaggggctggaatcccgcccctagtggtaccctccagaccagcgccaccgcctccgacagtgtcctcgctctacctctgacctctccggaggttccgctgcctccaagccggacttagggcttcaagaggcgggcgtgccctctggagtcccctaccatgactgaaggcgccagagactggcggtgtcttaagactccgggcaccgccacgcgctgtcaagcaacactctgcggacctgccggcgtagttgcagcgggggcttggggaggggctgggggttggacgggattgaggaaggtccgcacagcctgtctctgctcagttgcaataaacgtgacatcttgggagcgttcaaaaaaaaaaaaaaaaaa

SEQ ID NO: 104 - DNA, 2242 bp, Homo sapiens
ggggcctggtggccgcgcggcgctgctgggttctccgaggcgacctggccgccggccgctcctccgcgcgctgttccgcacttgctgccctcgcccggcccggagcgccgctgccatgcggctggcgctgctctgggccctggggctcctgggcgcgggcagccctctgccttcctggccgctcccaaatatagtctcagcatgcaatgtggaagcccctcaggtggcactgaggagcagcaggcagagtcagagaaggccccgagggagcccttggagccccaggtccttcaggacgatctcccaattagcctcaaaaaggtgcttcagggagttggtcccaggccgcccaaccctggtgtggtaccagcccgatggcactcgggtggtcagtgagggacacactttggagaactgctgctaccagggaagagtgcggggatatgcaggctcctgggtgtccatctgcacctgctctgggctcagaggcttggtggtcctgaccccagagagaagctataccctggagcaggggcctggggaccttcagggtcctcccattatttcgcgaatccaagatctccacctgccaggccacacctgtgccctgagctggcgggaatctgtacacactcagaagccaccagagcaccccctgggacagcgccacattcgccggaggcgggatgtggtaacagagaccaagactgtggagttggtgattgtggctgatcactcggaggcccagaaataccgggacttccagcacctgctaaaccgcacactggaagtggccctcttgctggacacattcttccggcccctgaatgtacgagtggcactagtgggcctggaggcctggacccagcgtgacctggtggagatcagcccaaacccagctgtcaccctcgaaaacttcctccactggcgcagggcacatttgctgcctcgattgccccatgacagtgcccagctggtgactggtacttcattctctgggcctacggtgggcatggccattcagaactccatctgttctcctgacttctcaggaggtgtgaacatggaccactccaccagcatcctgggagtcgcctcctccatagcccatgagttgggccacagcctgggcctggaccatgatttgcctgggaatagctgcccctgtccaggtccagccccagccaagacctgcatcatggaggcctccacagacttcctaccaggcctgaacttcagcaactgcagccgacgggccctggagaaagccctcctggatggaatgggcagctgcctcttcgaacggctgcctagcctaccccctatggctgctttctgcggaaatatgtttgtggagccgggcgagcagtgtgactgtggcttcctggatgactgcgtcgatccctgctgtgattctttgacctgccagctgaggccaggtgcacagtgtgcatctgacggaccctgttgtcaaaattgccagctgcgcccgtctggctggcagtgtcgtcctaccagaggggattgtgacttgcctgaattctgcccaggagacagctcccagtgtccccctgatgtcagcctaggggatggcgagccctgcgctggcgggcaagctgtgtgcatgcacgggcgttgtgcctcctatgcccagcagtgccagtcactttggggacctggagcccagcccgctgcgccactttgcctccagacagctaatactcggggaaatgcttttgggagctgtgggcgcaaccccagtggcagttatgtgtcctgcacccctagagatgccatttgtgggcagctccagtgccagacaggtaggacccagcctctgctgggctccatccgggatctactctgggagacaatagatgtgaatgggactgagctgaactgcagctgggtgcacctggacctgggcagtgatgtggcccagcccctcctgactctgcctggcacagcctgtggccctggcctggtgagcagcctgggtgggcaagaccaggtgtgagaagggacatttggaccacaatgaacagagcccagacttcaccattcaccaatgtcaaaggcagggactccaagggaagtcagtttcttacttcagatggagcaaagtcctatcaactcactatgccttggtttccccatctgtaaacgcagggtatggcctcaaccttattggcctcccagtcccattaaagctttgtgggaatctgaaaaaaaaaaaaaaaaa

SEQ ID NO: 105 - DNA, 2852 bp, Homo sapiens
ggggcctggtggccgcgcggcgctgctgggttctccgaggcgacctggccgccggccgctcctccgcgcgctgttccgcacttgctgccctcgcccggcccggagcgccgctgccatgcggctggcgctgctctgggccctggggctcctgggcgcgggcagccctctgccttcctggccgctcccaaatataggtggcactgaggagcagcaggcagagtcagagaaggccccgagggagcccttggagccccaggtccttcaggacgatctcccaattagcctcaaaaaggtgcttcagaccagtctgcctgagcccctgaggatcaagttggagctggacggtgacagtcatatcctggagctgctacagaatagggagttggtcccaggccgcccaaccctggtgtggtaccagcccgatggcactcgggtggtcagtgagggacacactttggagaactgctgctaccagggaagagtgcggggatatgcaggctcctgggtgtccatctgcacctgctctgggctcagaggcttggtggtcctgaccccagagagaagctataccctggagcaggggcctggggaccttcagggtcctcccattatttcgcgaatccaagatctccacctgccaggccacacctgtgccctgagctggcgggaatctgtacacactcagaagccaccagagcaccccctgggacagcgccacattcgccggaggcgggatgtggtaacagagaccaagactgtggagttggtgattgtggctgatcactcggaggcccagaaataccgggacttccagcacctgctaaaccgcacactggaagtggccctcttgctggacacattcttccggcccctgaatgtacgagtggcactagtgggcctggaggcctggacccagcgtgacctggtggagatcagcccaaacccagctgtcaccctcgaaaacttcctccactggcgcagggcacatttgctgcctcgattgccccatgacagtgcccagctggtgactggtacttcattctctgggcctacggtgggcatggccattcagaactccatctgttctcctgacttctcaggaggtgtgaacatggaccactccaccagcatcctgggagtcgcctcctccatagcccatgagttgggccacagcctgggcctggaccatgatttgcctgggaatagctgcccctgtccaggtccagccccagccaagacctgcatcatggaggcctccacagacttcctaccaggcctgaacttcagcaactgcagccgacgggccctggagaaagccctcctggatggaatgggcagctgcctcttcgaacggctgcctagcctaccccctatggctgctttctgcggaaatatgtttgtggagccgggcgagcagtgtgactgtggcttcctggatgactgcgtcgatccctgctgtgattctttgacctgccagctgaggccaggtgcacagtgtgcatctgacggaccctgttgtcaaaattgccagctgcgcccgtctggctggcagtgtcgtcctaccagaggggattgtgacttgcctgaattctgcccaggagacagctcccagtgtccccctgatgtcagcctaggggatggcgagccctgcgctggcgggcaagctgtgtgcatgcacgggcgttgtgcctcctatgcccagcagtgccagtcactttggggacctggagcccagcccgctgcgccactttgcctccagacagctaatactcggggaaatgcttttgggagctgtgggcgcaaccccagtggcagttatgtgtcctgcacccctagagatgccatttgtgggcagctccagtgccagacaggtaggacccagcctctgctgggctccatccgggatctactctgggagacaatagatgtgaatgggactgagctgaactgcagctgggtgcacctggacctgggcagtgatgtggcccagcccctcctgactctgcctggcacagcctgtggccctggcctggtgtgtatagaccatcgatgccagcgtgtggatctcctgggggcacaggaatgtcgaagcaaatgccatggacatggggtctgtgacagcaacaggcactgctactgtgaggagggctgggcaccccctgactgcaccactcagctcaaagcaaccagctccctgaccacagggctgctcctcagcctcctggtcttattggtcctggtgatgcttggtgccagctactggtaccgtgcccgcctgcaccagcgactctgccagctcaagggacccacctgccagtacagggcagcccaatctggtccctctgaacggccaggacctccgcagagggccctgctggcacgaggcactaagtctcaggggccagccaagcccccacccccaaggaagccactgcctgccgacccccagggccggtgcccatcgggtgacctgcccggcccaggggctggaatcccgcccctagtggtaccctccagaccagcgccaccgcctccgacagtgtcctcgctctacctctgacctctccggaggttccgctgcctccaagccggacttagggcttcaagaggcgggcgtgccctctggagtcccctaccatgactgaaggcgccagagactggcggtgtcttaagactccgggcaccgccacgcgctgtcaagcaacactctgcggacctgccggcgtagttgcagcgggggcttggggaggggctgggggttggacgggattgaggaaggtccgcacagcctgtctctgctcagttgcaataaacgtgacatcttgggagcgttcaaaaaaaaaaaaaaaaaa

SEQ ID NO: 106 - DNA, 2782 bp, Homo sapiens
ggggcctggtggccgcgcggcgctgctgggttctccgaggcgacctggccgccggccgctcctccgcgcgctgttccgcacttgctgccctcgcccggcccggagcgccgctgccatgcggctggcgctgctctgggccctggggctcctgggcgcgggcagccctctgccttcctggccgctcccaaatataggtggcactgaggagcagcaggcagagtcagagaaggccccgagggagcccttggagccccaggtccttcaggacgatctcccaattagcctcaaaaaggtgcttcagaccagtctgcctgagcccctgaggatcaagttggagctggacggtgacagtcatatcctggagctgctacagaatagggagttggtcccaggccgcccaaccctggtgtggtaccagcccgatggcactcgggtggtcagtgagggacacactttggagaactgctgctaccagggaagagtgcggggatatgcaggctcctgggtgtccatctgcacctgctctgggctcagaggcttggtggtcctgaccccagagagaagctataccctggagcaggggcctggggaccttcagggtcctcccattatttcgcgaatccaagatctccacctgccaggccacacctgtgccctgagctggcgggaatctgtacacactcagaagccaccagagcaccccctgggacagcgccacattcgccggaggcgggatgtggtaacagagaccaagactgtggagttggtgattgtggctgatcactcggaggcccagaaataccgggacttccagcacctgctaaaccgcacactggaagtggccctcttgctggacacattcttccggcccctgaatgtacgagtggcactagtgggcctggaggcctggacccagcgtgacctggtggagatcagcccaaacccagctgtcaccctcgaaaacttcctccactggcgcagggcacatttgctgcctcgattgccccatgacagtgcccagctggtgactggtacttcattctctgggcctacggtgggcatggccattcagaactccatctgttctcctgacttctcaggaggtgtgaacatggaccactccaccagcatcctgggagtcgcctcctccatagcccatgagttgggccacagcctgggcctggaccatgatttgcctgggaatagctgcccctgtccaggtccagccccagccaagacctgcatcatggaggcctccacagacttcctaccaggcctgaacttcagcaactgcagccgacgggccctggagaaagccctcctggatggaatgggcagctgcctcttcgaacggctgcctagcctaccccctatggctgctttctgcggaaatatgtttgtggagccgggcgagcagtgtgactgtggcttcctggatgactgcgtcgatccctgctgtgattctttgacctgccagctgaggccaggtgcacagtgtgcatctgacggaccctgttgtcaaaattgccagctgcgcccgtctggctggcagtgtcgtcctaccagaggggattgtgacttgcctgaattctgcccaggagacagctcccagtgtccccctgatgtcagcctaggggatggcgagccctgcgctggcgggcaagctgtgtgcatgcacgggcgttgtgcctcctatgcccagcagtgccagtcactttggggacctggagcccagcccgctgcgccactttgcctccagacagctaatactcggggaaatgcttttgggagctgtgggcgcaaccccagtggcagttatgtgtcctgcacccctagagatgccatttgtgggcagctccagtgccagacaggtaggacccagcctctgctgggctccatccgggatctactctgggagacaatagatgtgaatgggactgagctgaactgcagctgggtgcacctggacctgggcagtgatgtggcccagcccctcctgactctgcctggcacagcctgtggccctggcctggtgtgtatagaccatcgatgccagcgtgtggatctcctgggggcacaggaatgtcgaagcaaatgccatggacatggggtctgtgacagcaacaggcactgctactgtgaggagggctgggcaccccctgactgcaccactcagctcaaagcaaccagctccctgaccacagggctgctcctcagcctcctggtcttattggtcctggtgatgcttggtgccagctactggtaccgtgcccgcctgcaccagcgactctgccagctcaagggacccacctgccagtacagtctcaggggccagccaagcccccacccccaaggaagccactgcctgccgacccccagggccggtgcccatcgggtgacctgcccggcccaggggctggaatcccgcccctagtggtaccctccagaccagcgccaccgcctccgacagtgtcctcgctctacctctgacctctccggaggttccgctgcctccaagccggacttagggcttcaagaggcgggcgtgccctctggagtcccctaccatgactgaaggcgccagagactggcggtgtcttaagactccgggcaccgccacgcgctgtcaagcaacactctgcggacctgccggcgtagttgcagcgggggcttggggaggggctgggggttggacgggattgaggaaggtccgcacagcctgtctctgctcagttgcaataaacgtgacatcttgggagcgttcaaaaaaaaaaaaaaaaaa

SEQ ID NO: 107 - DNA, 2927 bp, Homo sapiens
ggggcctggtggccgcgcggcgctgctgggttctccgaggcgacctggccgccggccgctcctccgcgcgctgttccgcacttgctgccctcgcccggcccggagcgccgctgccatgcggctggcgctgctctgggccctggggctcctgggcgcgggcagccctctgccttcctggccgctcccaaatataggtggcactgaggagcagcaggcagagtcagagaaggccccgagggagcccttggagccccaggtccttcaggacgatctcccaattagcctcaaaaaggtgcttcagaccagtctgcctgagcccctgaggatcaagttggagctggacggtgacagtcatatcctggagctgctacagaatagggagttggtcccaggccgcccaaccctggtgtggtaccagcccgatggcactcgggtggtcagtgagggacacactttggagaactgctgctaccagggaagagtgcggggatatgcaggctcctgggtgtccatctgcacctgctctgggctcagaggcttggtggtcctgaccccagagagaagctataccctggagcaggggcctggggaccttcagggtcctcccattatttcgcgaatccaagatctccacctgccaggccacacctgtgccctgagctggcgggaatctgtacacactcagaagccaccagagcaccccctgggacagcgccacattcgccggaggcgggatgtggtaacagagaccaagactgtggagttggtgattgtggctgatcactcggaggcccagaaataccgggacttccagcacctgctaaaccgcacactggaagtggccctcttgctggacacattcttccggcccctgaatgtacgagtggcactagtgggcctggaggcctggacccagcgtgacctggtggagatcagcccaaacccagctgtcaccctcgaaaacttcctccactggcgcagggcacatttgctgcctcgattgccccatgacagtgcccagctggtgactggtacttcattctctgggcctacggtgggcatggccattcagaactccatctgttctcctgacttctcaggaggtgtgaacatggaccactccaccagcatcctgggagtcgcctcctccatagcccatgagttgggccacagcctgggcctggaccatgatttgcctgggaatagctgcccctgtccaggtccagccccagccaagacctgcatcatggaggcctccacagacttcctaccaggcctgaacttcagcaactgcagccgacgggccctggagaaagccctcctggatggaatgggcagctgcctcttcgaacggctgcctagcctaccccctatggctgctttctgcggaaatatgtttgtggagccgggcgagcagtgtgactgtggcttcctggatgactgcgtcgatccctgctgtgattctttgacctgccagctgaggccaggtgcacagtgtgcatctgacggaccctgttgtcaaaattgccagctgcgcccgtctggctggcagtgtcgtcctaccagaggggattgtgacttgcctgaattctgcccaggagacagctcccagtgtccccctgatgtcagcctaggggatggcgagccctgcgctggcgggcaagctgtgtgcatgcacgggcgttgtgcctcctatgcccagcagtgccagtcactttggggacctggagcccagcccgctgcgccactttgcctccagacagctaatactcggggaaatgcttttgggagctgtgggcgcaaccccagtggcagttatgtgtcctgcacccctagagatgccatttgtgggcagctccagtgccagacaggtaggacccagcctctgctgggctccatccgggatctactctgggagacaatagatgtgaatgggactgagctgaactgcagctgggtgcacctggacctgggcagtgatgtggcccagcccctcctgactctgcctggcacagcctgtggccctggcctggtgtgtatagaccatcgatgccagcgtgtggatctcctgggggcacaggaatgtcgaagcaaatgccatggacatggggtctgtgacagcaacaggcactgctactgtgaggagggctgggcaccccctgactgcaccactcagctcaaagcaaccagctccctgaccacagggctgctcctcagcctcctggtcttattggtcctggtgatgcttggtgccagctactggtaccgtgcccgcctgcaccagcgactctgccagctcaagggacccacctgccagtacagggcagcccaatctggtccctctgaacggccaggacctccgcagagggccctgctggcacgaggcactaagcaggctagtgctctcagcttcccggcccccccttccaggccgctgccgcctgaccctgtgtccaagagactccagtctcaggggccagccaagcccccacccccaaggaagccactgcctgccgacccccagggccggtgcccatcgggtgacctgcccggcccaggggctggaatcccgcccctagtggtaccctccagaccagcgccaccgcctccgacagtgtcctcgctctacctctgacctctccggaggttccgctgcctccaagccggacttagggcttcaagaggcgggcgtgccctctggagtcccctaccatgactgaaggcgccagagactggcggtgtcttaagactccgggcaccgccacgcgctgtcaagcaacactctgcggacctgccggcgtagttgcagcgggggcttggggaggggctgggggttggacgggattgaggaaggtccgcacagcctgtctctgctcagttgcaataaacgtgacatcttgggagcgttcaaaaaaaaaaaaaaaaaa

SEQ ID NO: 108 - DNA, 2924 bp, Homo sapiens
ggggcctggtggccgcgcggcgctgctgggttctccgaggcgacctggccgccggccgctcctccgcgcgctgttccgcacttgctgccctcgcccggcccggagcgccgctgccatgcggctggcgctgctctgggccctggggctcctgggcgcgggcagccctctgccttcctggccgctcccaaatataggtggcactgaggagcagcaggcagagtcagagaaggccccgagggagcccttggagccccaggtccttcaggacgatctcccaattagcctcaaaaaggtgcttcagaccagtctgcctgagcccctgaggatcaagttggagctggacggtgacagtcatatcctggagctgctacagaatagggagttggtcccaggccgcccaaccctggtgtggtaccagcccgatggcactcgggtggtcagtgagggacacactttggagaactgctgctaccagggaagagtgcggggatatgcaggctcctgggtgtccatctgcacctgctctgggctcagaggcttggtggtcctgaccccagagagaagctataccctggagcaggggcctggggaccttcagggtcctcccattatttcgcgaatccaagatctccacctgccaggccacacctgtgccctgagctggcgggaatctgtacacactcagaagccaccagagcaccccctgggacagcgccacattcgccggaggcgggatgtggtaacagagaccaagactgtggagttggtgattgtggctgatcactcggaggcccagaaataccgggacttccagcacctgctaaaccgcacactggaagtggccctcttgctggacacattcttccggcccctgaatgtacgagtggcactagtgggcctggaggcctggacccagcgtgacctggtggagatcagcccaaacccagctgtcaccctcgaaaacttcctccactggcgcagggcacatttgctgcctcgattgccccatgacagtgcccagctggtgactggtacttcattctctgggcctacggtgggcatggccattcagaactccatctgttctcctgacttctcaggaggtgtgaacatggaccactccaccagcatcctgggagtcgcctcctccatagcccatgagttgggccacagcctgggcctggaccatgatttgcctgggaatagctgcccctgtccaggtccagccccagccaagacctgcatcatggaggcctccacagacttcctaccaggcctgaacttcagcaactgcagccgacgggccctggagaaagccctcctggatggaatgggcagctgcctcttcgaacggctgcctagcctaccccctatggctgctttctgcggaaatatgtttgtggagccgggcgagcagtgtgactgtggcttcctggatgactgcgtcgatccctgctgtgattctttgacctgccagctgaggccaggtgcacagtgtgcatctgacggaccctgttgtcaaaattgccagctgcgcccgtctggctggcagtgtcgtcctaccagaggggattgtgacttgcctgaattctgcccaggagacagctcccagtgtccccctgatgtcagcctaggggatggcgagccctgcgctggcgggcaagctgtgtgcatgcacgggcgttgtgcctcctatgcccagcagtgccagtcactttggggacctggagcccagcccgctgcgccactttgcctccagacagctaatactcggggaaatgcttttgggagctgtgggcgcaaccccagtggcagttatgtgtcctgcacccctagagatgccatttgtgggcagctccagtgccagacaggtaggacccagcctctgctgggctccatccgggatctactctgggagacaatagatgtgaatgggactgagctgaactgcagctgggtgcacctggacctgggcagtgatgtggcccagcccctcctgactctgcctggcacagcctgtggccctggcctggtgtgtatagaccatcgatgccagcgtgtggatctcctgggggcacaggaatgtcgaagcaaatgccatggacatggggtctgtgacagcaacaggcactgctactgtgaggagggctgggcaccccctgactgcaccactcagctcaaagcaaccagctccctgaccacagggctgctcctcagcctcctggtcttattggtcctggtgatgcttggtgccagctactggtaccgtgcccgcctgcaccagcgactctgccagctcaagggacccacctgccagtacagggcagcccaatctggtccctctgaacggccaggacctccgcagagggccctgctggcacgaggcactaaggctgagctggctgaccgacccaatccccctacccgccctctgcccgctgacccggtggtgagaagcccgaagtctcaggggccagccaagcccccacccccaaggaagccactgcctgccgacccccagggccggtgcccatcgggtgacctgcccggcccaggggctggaatcccgcccctagtggtaccctccagaccagcgccaccgcctccgacagtgtcctcgctctacctctgacctctccggaggttccgctgcctccaagccggacttagggcttcaagaggcgggcgtgccctctggagtcccctaccatgactgaaggcgccagagactggcggtgtcttaagactccgggcaccgccacgcgctgtcaagcaacactctgcggacctgccggcgtagttgcagcgggggcttggggaggggctgggggttggacgggattgaggaaggtccgcacagcctgtctctgctcagttgcaataaacgtgacatcttgggagcgttcaaaaaaaaaaaaaaaaaa

SEQ ID NO: 109 - DNA, 2996 bp, Homo sapiens
ggggcctggtggccgcgcggcgctgctgggttctccgaggcgacctggccgccggccgctcctccgcgcgctgttccgcacttgctgccctcgcccggcccggagcgccgctgccatgcggctggcgctgctctgggccctggggctcctgggcgcgggcagccctctgccttcctggccgctcccaaatataggtggcactgaggagcagcaggcagagtcagagaaggccccgagggagcccttggagccccaggtccttcaggacgatctcccaattagcctcaaaaaggtgcttcagaccagtctgcctgagcccctgaggatcaagttggagctggacggtgacagtcatatcctggagctgctacagaatagggagttggtcccaggccgcccaaccctggtgtggtaccagcccgatggcactcgggtggtcagtgagggacacactttggagaactgctgctaccagggaagagtgcggggatatgcaggctcctgggtgtccatctgcacctgctctgggctcagaggcttggtggtcctgaccccagagagaagctataccctggagcaggggcctggggaccttcagggtcctcccattatttcgcgaatccaagatctccacctgccaggccacacctgtgccctgagctggcgggaatctgtacacactcagaagccaccagagcaccccctgggacagcgccacattcgccggaggcgggatgtggtaacagagaccaagactgtggagttggtgattgtggctgatcactcggaggcccagaaataccgggacttccagcacctgctaaaccgcacactggaagtggccctcttgctggacacattcttccggcccctgaatgtacgagtggcactagtgggcctggaggcctggacccagcgtgacctggtggagatcagcccaaacccagctgtcaccctcgaaaacttcctccactggcgcagggcacatttgctgcctcgattgccccatgacagtgcccagctggtgactggtacttcattctctgggcctacggtgggcatggccattcagaactccatctgttctcctgacttctcaggaggtgtgaacatggaccactccaccagcatcctgggagtcgcctcctccatagcccatgagttgggccacagcctgggcctggaccatgatttgcctgggaatagctgcccctgtccaggtccagccccagccaagacctgcatcatggaggcctccacagacttcctaccaggcctgaacttcagcaactgcagccgacgggccctggagaaagccctcctggatggaatgggcagctgcctcttcgaacggctgcctagcctaccccctatggctgctttctgcggaaatatgtttgtggagccgggcgagcagtgtgactgtggcttcctggatgactgcgtcgatccctgctgtgattctttgacctgccagctgaggccaggtgcacagtgtgcatctgacggaccctgttgtcaaaattgccagctgcgcccgtctggctggcagtgtcgtcctaccagaggggattgtgacttgcctgaattctgcccaggagacagctcccagtgtccccctgatgtcagcctaggggatggcgagccctgcgctggcgggcaagctgtgtgcatgcacgggcgttgtgcctcctatgcccagcagtgccagtcactttggggacctggagcccagcccgctgcgccactttgcctccagacagctaatactcggggaaatgcttttgggagctgtgggcgcaaccccagtggcagttatgtgtcctgcacccctagagatgccatttgtgggcagctccagtgccagacaggtaggacccagcctctgctgggctccatccgggatctactctgggagacaatagatgtgaatgggactgagctgaactgcagctgggtgcacctggacctgggcagtgatgtggcccagcccctcctgactctgcctggcacagcctgtggccctggcctggtgtgtatagaccatcgatgccagcgtgtggatctcctgggggcacaggaatgtcgaagcaaatgccatggacatggggtctgtgacagcaacaggcactgctactgtgaggagggctgggcaccccctgactgcaccactcagctcaaagcaaccagctccctgaccacagggctgctcctcagcctcctggtcttattggtcctggtgatgcttggtgccagctactggtaccgtgcccgcctgcaccagcgactctgccagctcaagggacccacctgccagtacagggcagcccaatctggtccctctgaacggccaggacctccgcagagggccctgctggcacgaggcactaaggctagtgctctcagcttcccggcccccccttccaggccgctgccgcctgaccctgtgtccaagagactccaggctgagctggctgaccgacccaatccccctacccgccctctgcccgctgacccggtggtgagaagcccgaagtctcaggggccagccaagcccccacccccaaggaagccactgcctgccgacccccagggccggtgcccatcgggtgacctgcccggcccaggggctggaatcccgcccctagtggtaccctccagaccagcgccaccgcctccgacagtgtcctcgctctacctctgacctctccggaggttccgctgcctccaagccggacttagggcttcaagaggcgggcgtgccctctggagtcccctaccatgactgaaggcgccagagactggcggtgtcttaagactccgggcaccgccacgcgctgtcaagcaacactctgcggacctgccggcgtagttgcagcgggggcttggggaggggctgggggttggacgggattgaggaaggtccgcacagcctgtctctgctcagttgcaataaacgtgacatcttgggagcgttcaaaaaaaaaaaaaaaaaa

SEQ ID NO: 110 - DNA, 2999 bp, Homo sapiens
ggggcctggtggccgcgcggcgctgctgggttctccgaggcgacctggccgccggccgctcctccgcgcgctgttccgcacttgctgccctcgcccggcccggagcgccgctgccatgcggctggcgctgctctgggccctggggctcctgggcgcgggcagccctctgccttcctggccgctcccaaatataggtggcactgaggagcagcaggcagagtcagagaaggccccgagggagcccttggagccccaggtccttcaggacgatctcccaattagcctcaaaaaggtgcttcagaccagtctgcctgagcccctgaggatcaagttggagctggacggtgacagtcatatcctggagctgctacagaatagggagttggtcccaggccgcccaaccctggtgtggtaccagcccgatggcactcgggtggtcagtgagggacacactttggagaactgctgctaccagggaagagtgcggggatatgcaggctcctgggtgtccatctgcacctgctctgggctcagaggcttggtggtcctgaccccagagagaagctataccctggagcaggggcctggggaccttcagggtcctcccattatttcgcgaatccaagatctccacctgccaggccacacctgtgccctgagctggcgggaatctgtacacactcagaagccaccagagcaccccctgggacagcgccacattcgccggaggcgggatgtggtaacagagaccaagactgtggagttggtgattgtggctgatcactcggaggcccagaaataccgggacttccagcacctgctaaaccgcacactggaagtggccctcttgctggacacattcttccggcccctgaatgtacgagtggcactagtgggcctggaggcctggacccagcgtgacctggtggagatcagcccaaacccagctgtcaccctcgaaaacttcctccactggcgcagggcacatttgctgcctcgattgccccatgacagtgcccagctggtgactggtacttcattctctgggcctacggtgggcatggccattcagaactccatctgttctcctgacttctcaggaggtgtgaacatggaccactccaccagcatcctgggagtcgcctcctccatagcccatgagttgggccacagcctgggcctggaccatgatttgcctgggaatagctgcccctgtccaggtccagccccagccaagacctgcatcatggaggcctccacagacttcctaccaggcctgaacttcagcaactgcagccgacgggccctggagaaagccctcctggatggaatgggcagctgcctcttcgaacggctgcctagcctaccccctatggctgctttctgcggaaatatgtttgtggagccgggcgagcagtgtgactgtggcttcctggatgactgcgtcgatccctgctgtgattctttgacctgccagctgaggccaggtgcacagtgtgcatctgacggaccctgttgtcaaaattgccagctgcgcccgtctggctggcagtgtcgtcctaccagaggggattgtgacttgcctgaattctgcccaggagacagctcccagtgtccccctgatgtcagcctaggggatggcgagccctgcgctggcgggcaagctgtgtgcatgcacgggcgttgtgcctcctatgcccagcagtgccagtcactttggggacctggagcccagcccgctgcgccactttgcctccagacagctaatactcggggaaatgcttttgggagctgtgggcgcaaccccagtggcagttatgtgtcctgcacccctagagatgccatttgtgggcagctccagtgccagacaggtaggacccagcctctgctgggctccatccgggatctactctgggagacaatagatgtgaatgggactgagctgaactgcagctgggtgcacctggacctgggcagtgatgtggcccagcccctcctgactctgcctggcacagcctgtggccctggcctggtgtgtatagaccatcgatgccagcgtgtggatctcctgggggcacaggaatgtcgaagcaaatgccatggacatggggtctgtgacagcaacaggcactgctactgtgaggagggctgggcaccccctgactgcaccactcagctcaaagcaaccagctccctgaccacagggctgctcctcagcctcctggtcttattggtcctggtgatgcttggtgccagctactggtaccgtgcccgcctgcaccagcgactctgccagctcaagggacccacctgccagtacagggcagcccaatctggtccctctgaacggccaggacctccgcagagggccctgctggcacgaggcactaagcaggctagtgctctcagcttcccggcccccccttccaggccgctgccgcctgaccctgtgtccaagagactccaggctgagctggctgaccgacccaatccccctacccgccctctgcccgctgacccggtggtgagaagcccgaagtctcaggggccagccaagcccccacccccaaggaagccactgcctgccgacccccagggccggtgcccatcgggtgacctgcccggcccaggggctggaatcccgcccctagtggtaccctccagaccagcgccaccgcctccgacagtgtcctcgctctacctctgacctctccggaggttccgctgcctccaagccggacttagggcttcaagaggcgggcgtgccctctggagtcccctaccatgactgaaggcgccagagactggcggtgtcttaagactccgggcaccgccacgcgctgtcaagcaacactctgcggacctgccggcgtagttgcagcgggggcttggggaggggctgggggttggacgggattgaggaaggtccgcacagcctgtctctgctcagttgcaataaacgtgacatcttgggagcgttcaaaaaaaaaaaaaaaaaa

SEQ ID NO: 111 - DNA, 3138 bp, Homo sapiens
ggggcctggtggccgcgcggcgctgctgggttctccgaggcgacctggccgccggccgctcctccgcgcgctgttccgcacttgctgccctcgcccggcccggagcgccgctgccatgcggctggcgctgctctgggccctggggctcctgggcgcgggcagccctctgccttcctggccgctcccaaatataggtggcactgaggagcagcaggcagagtcagagaaggccccgagggagcccttggagccccaggtccttcaggacgatctcccaattagcctcaaaaaggtgcttcagaccagtctgcctgagcccctgaggatcaagttggagctggacggtgacagtcatatcctggagctgctacagaatagggagttggtcccaggccgcccaaccctggtgtggtaccagcccgatggcactcgggtggtcagtgagggacacactttggagaactgctgctaccagggaagagtgcggggatatgcaggctcctgggtgtccatctgcacctgctctgggctcagaggcttggtggtcctgaccccagagagaagctataccctggagcaggggcctggggaccttcagggtcctcccattatttcgcgaatccaagatctccacctgccaggccacacctgtgccctgagctggcgggaatctgtacacactcagaagccaccagagcaccccctgggacagcgccacattcgccggaggcgggatgtggtaacagagaccaagactgtggagttggtgattgtggctgatcactcggaggcccagaaataccgggacttccagcacctgctaaaccgcacactggaagtggccctcttgctggacacattcttccggcccctgaatgtacgagtggcactagtgggcctggaggcctggacccagcgtgacctggtggagatcagcccaaacccagctgtcaccctcgaaaacttcctccactggcgcagggcacatttgctgcctcgattgccccatgacagtgcccagctggtgactggtacttcattctctgggcctacggtgggcatggccattcagaactccatctgttctcctgacttctcaggaggtgtgaacatggaccactccaccagcatcctgggagtcgcctcctccatagcccatgagttgggccacagcctgggcctggaccatgatttgcctgggaatagctgcccctgtccaggtccagccccagccaagacctgcatcatggaggcctccacagacttcctaccaggcctgaacttcagcaactgcagccgacgggccctggagaaagccctcctggatggaatgggcagctgcctcttcgaacggctgcctagcctaccccctatggctgctttctgcggaaatatgtttgtggagccgggcgagcagtgtgactgtggcttcctggatgactgcgtcgatccctgctgtgattctttgacctgccagctgaggccaggtgcacagtgtgcatctgacggaccctgttgtcaaaattgccagctgcgcccgtctggctggcagtgtcgtcctaccagaggggattgtgacttgcctgaattctgcccaggagacagctcccagtgtccccctgatgtcagcctaggggatggcgagccctgcgctggcgggcaagctgtgtgcatgcacgggcgttgtgcctcctatgcccagcagtgccagtcactttggggacctggagcccagcccgctgcgccactttgcctccagacagctaatactcggggaaatgcttttgggagctgtgggcgcaaccccagtggcagttatgtgtcctgcacccctagagatgccatttgtgggcagctccagtgccagacaggtaggacccagcctctgctgggctccatccgggatctactctgggagacaatagatgtgaatgggactgagctgaactgcagctgggtgcacctggacctgggcagtgatgtggcccagcccctcctgactctgcctggcacagcctgtggccctggcctggtgtgtatagaccatcgatgccagcgtgtggatctcctgggggcacaggaatgtcgaagcaaatgccatggacatggggtctgtgacagcaacaggcactgctactgtgaggagggctgggcaccccctgactgcaccactcagctcaaagcaaccagctccctgaccacagggctgctcctcagcctcctggtcttattggtcctggtgatgcttggtgccagctactggtaccgtgcccgcctgcaccagcgactctgccagctcaagggacccacctgccagtacagggcagcccaatctggtccctctgaacggccaggacctccgcagagggccctgctggcacgaggcactaaggctagtgctctcagcttcccggcccccccttccaggccgctgccgcctgaccctgtgtccaagagactccaggctgagctggctgaccgacccaatccccctacccgccctctgcccgctgacccggtggtgagaagcccgaaggtaacggtggggggagagaagggcacggcctctccccccacctagggctgtggtgctggtagccatgacggtggtggccgtggcgagatgccccctcagtgcatgagggcacatatcccggtggtgcctttaatggtgacagtctcaggggccagccaagcccccacccccaaggaagccactgcctgccgacccccagggccggtgcccatcgggtgacctgcccggcccaggggctggaatcccgcccctagtggtaccctccagaccagcgccaccgcctccgacagtgtcctcgctctacctctgacctctccggaggttccgctgcctccaagccggacttagggcttcaagaggcgggcgtgccctctggagtcccctaccatgactgaaggcgccagagactggcggtgtcttaagactccgggcaccgccacgcgctgtcaagcaacactctgcggacctgccggcgtagttgcagcgggggcttggggaggggctgggggttggacgggattgaggaaggtccgcacagcctgtctctgctcagttgcaataaacgtgacatcttgggagcgttcaaaaaaaaaaaaaaaaaa

SEQ ID NO: 112 - DNA, 3141 bp, Homo sapiens
ggggcctggtggccgcgcggcgctgctgggttctccgaggcgacctggccgccggccgctcctccgcgcgctgttccgcacttgctgccctcgcccggcccggagcgccgctgccatgcggctggcgctgctctgggccctggggctcctgggcgcgggcagccctctgccttcctggccgctcccaaatataggtggcactgaggagcagcaggcagagtcagagaaggccccgagggagcccttggagccccaggtccttcaggacgatctcccaattagcctcaaaaaggtgcttcagaccagtctgcctgagcccctgaggatcaagttggagctggacggtgacagtcatatcctggagctgctacagaatagggagttggtcccaggccgcccaaccctggtgtggtaccagcccgatggcactcgggtggtcagtgagggacacactttggagaactgctgctaccagggaagagtgcggggatatgcaggctcctgggtgtccatctgcacctgctctgggctcagaggcttggtggtcctgaccccagagagaagctataccctggagcaggggcctggggaccttcagggtcctcccattatttcgcgaatccaagatctccacctgccaggccacacctgtgccctgagctggcgggaatctgtacacactcagaagccaccagagcaccccctgggacagcgccacattcgccggaggcgggatgtggtaacagagaccaagactgtggagttggtgattgtggctgatcactcggaggcccagaaataccgggacttccagcacctgctaaaccgcacactggaagtggccctcttgctggacacattcttccggcccctgaatgtacgagtggcactagtgggcctggaggcctggacccagcgtgacctggtggagatcagcccaaacccagctgtcaccctcgaaaacttcctccactggcgcagggcacatttgctgcctcgattgccccatgacagtgcccagctggtgactggtacttcattctctgggcctacggtgggcatggccattcagaactccatctgttctcctgacttctcaggaggtgtgaacatggaccactccaccagcatcctgggagtcgcctcctccatagcccatgagttgggccacagcctgggcctggaccatgatttgcctgggaatagctgcccctgtccaggtccagccccagccaagacctgcatcatggaggcctccacagacttcctaccaggcctgaacttcagcaactgcagccgacgggccctggagaaagccctcctggatggaatgggcagctgcctcttcgaacggctgcctagcctaccccctatggctgctttctgcggaaatatgtttgtggagccgggcgagcagtgtgactgtggcttcctggatgactgcgtcgatccctgctgtgattctttgacctgccagctgaggccaggtgcacagtgtgcatctgacggaccctgttgtcaaaattgccagctgcgcccgtctggctggcagtgtcgtcctaccagaggggattgtgacttgcctgaattctgcccaggagacagctcccagtgtccccctgatgtcagcctaggggatggcgagccctgcgctggcgggcaagctgtgtgcatgcacgggcgttgtgcctcctatgcccagcagtgccagtcactttggggacctggagcccagcccgctgcgccactttgcctccagacagctaatactcggggaaatgcttttgggagctgtgggcgcaaccccagtggcagttatgtgtcctgcacccctagagatgccatttgtgggcagctccagtgccagacaggtaggacccagcctctgctgggctccatccgggatctactctgggagacaatagatgtgaatgggactgagctgaactgcagctgggtgcacctggacctgggcagtgatgtggcccagcccctcctgactctgcctggcacagcctgtggccctggcctggtgtgtatagaccatcgatgccagcgtgtggatctcctgggggcacaggaatgtcgaagcaaatgccatggacatggggtctgtgacagcaacaggcactgctactgtgaggagggctgggcaccccctgactgcaccactcagctcaaagcaaccagctccctgaccacagggctgctcctcagcctcctggtcttattggtcctggtgatgcttggtgccagctactggtaccgtgcccgcctgcaccagcgactctgccagctcaagggacccacctgccagtacagggcagcccaatctggtccctctgaacggccaggacctccgcagagggccctgctggcacgaggcactaagcaggctagtgctctcagcttcccggcccccccttccaggccgctgccgcctgaccctgtgtccaagagactccaggctgagctggctgaccgacccaatccccctacccgccctctgcccgctgacccggtggtgagaagcccgaaggtaacggtggggggagagaagggcacggcctctccccccacctagggctgtggtgctggtagccatgacggtggtggccgtggcgagatgccccctcagtgcatgagggcacatatcccggtggtgcctttaatggtgacagtctcaggggccagccaagcccccacccccaaggaagccactgcctgccgacccccagggccggtgcccatcgggtgacctgcccggcccaggggctggaatcccgcccctagtggtaccctccagaccagcgccaccgcctccgacagtgtcctcgctctacctctgacctctccggaggttccgctgcctccaagccggacttagggcttcaagaggcgggcgtgccctctggagtcccctaccatgactgaaggcgccagagactggcggtgtcttaagactccgggcaccgccacgcgctgtcaagcaacactctgcggacctgccggcgtagttgcagcgggggcttggggaggggctgggggttggacgggattgaggaaggtccgcacagcctgtctctgctcagttgcaataaacgtgacatcttgggagcgttcaaaaaaaaaaaaaaaaaa

SEQ ID NO: 113 - DNA, 3066 bp, Homo sapiens
ggggcctggtggccgcgcggcgctgctgggttctccgaggcgacctggccgccggccgctcctccgcgcgctgttccgcacttgctgccctcgcccggcccggagcgccgctgccatgcggctggcgctgctctgggccctggggctcctgggcgcgggcagccctctgccttcctggccgctcccaaatataggtggcactgaggagcagcaggcagagtcagagaaggccccgagggagcccttggagccccaggtccttcaggacgatctcccaattagcctcaaaaaggtgcttcagaccagtctgcctgagcccctgaggatcaagttggagctggacggtgacagtcatatcctggagctgctacagaatagggagttggtcccaggccgcccaaccctggtgtggtaccagcccgatggcactcgggtggtcagtgagggacacactttggagaactgctgctaccagggaagagtgcggggatatgcaggctcctgggtgtccatctgcacctgctctgggctcagaggcttggtggtcctgaccccagagagaagctataccctggagcaggggcctggggaccttcagggtcctcccattatttcgcgaatccaagatctccacctgccaggccacacctgtgccctgagctggcgggaatctgtacacactcagaagccaccagagcaccccctgggacagcgccacattcgccggaggcgggatgtggtaacagagaccaagactgtggagttggtgattgtggctgatcactcggaggcccagaaataccgggacttccagcacctgctaaaccgcacactggaagtggccctcttgctggacacattcttccggcccctgaatgtacgagtggcactagtgggcctggaggcctggacccagcgtgacctggtggagatcagcccaaacccagctgtcaccctcgaaaacttcctccactggcgcagggcacatttgctgcctcgattgccccatgacagtgcccagctggtgactggtacttcattctctgggcctacggtgggcatggccattcagaactccatctgttctcctgacttctcaggaggtgtgaacatggaccactccaccagcatcctgggagtcgcctcctccatagcccatgagttgggccacagcctgggcctggaccatgatttgcctgggaatagctgcccctgtccaggtccagccccagccaagacctgcatcatggaggcctccacagacttcctaccaggcctgaacttcagcaactgcagccgacgggccctggagaaagccctcctggatggaatgggcagctgcctcttcgaacggctgcctagcctaccccctatggctgctttctgcggaaatatgtttgtggagccgggcgagcagtgtgactgtggcttcctggatgactgcgtcgatccctgctgtgattctttgacctgccagctgaggccaggtgcacagtgtgcatctgacggaccctgttgtcaaaattgccagctgcgcccgtctggctggcagtgtcgtcctaccagaggggattgtgacttgcctgaattctgcccaggagacagctcccagtgtccccctgatgtcagcctaggggatggcgagccctgcgctggcgggcaagctgtgtgcatgcacgggcgttgtgcctcctatgcccagcagtgccagtcactttggggacctggagcccagcccgctgcgccactttgcctccagacagctaatactcggggaaatgcttttgggagctgtgggcgcaaccccagtggcagttatgtgtcctgcacccctagagatgccatttgtgggcagctccagtgccagacaggtaggacccagcctctgctgggctccatccgggatctactctgggagacaatagatgtgaatgggactgagctgaactgcagctgggtgcacctggacctgggcagtgatgtggcccagcccctcctgactctgcctggcacagcctgtggccctggcctggtgtgtatagaccatcgatgccagcgtgtggatctcctgggggcacaggaatgtcgaagcaaatgccatggacatggggtctgtgacagcaacaggcactgctactgtgaggagggctgggcaccccctgactgcaccactcagctcaaagcaaccagctccctgaccacagggctgctcctcagcctcctggtcttattggtcctggtgatgcttggtgccagctactggtaccgtgcccgcctgcaccagcgactctgccagctcaagggacccacctgccagtacagggcagcccaatctggtccctctgaacggccaggacctccgcagagggccctgctggcacgaggcactaaggctgagctggctgaccgacccaatccccctacccgccctctgcccgctgacccggtggtgagaagcccgaaggtaacggtggggggagagaagggcacggcctctccccccacctagggctgtggtgctggtagccatgacggtggtggccgtggcgagatgccccctcagtgcatgagggcacatatcccggtggtgcctttaatggtgacagtctcaggggccagccaagcccccacccccaaggaagccactgcctgccgacccccagggccggtgcccatcgggtgacctgcccggcccaggggctggaatcccgcccctagtggtaccctccagaccagcgccaccgcctccgacagtgtcctcgctctacctctgacctctccggaggttccgctgcctccaagccggacttagggcttcaagaggcgggcgtgccctctggagtcccctaccatgactgaaggcgccagagactggcggtgtcttaagactccgggcaccgccacgcgctgtcaagcaacactctgcggacctgccggcgtagttgcagcgggggcttggggaggggctgggggttggacgggattgaggaaggtccgcacagcctgtctctgctcagttgcaataaacgtgacatcttgggagcgttcaaaaaaaaaaaaaaaaaa

SEQ ID NO: 114 - DNA, 2212 bp, Homo sapiens
ccaccctgggcccgcccccggctccatcttgcgggagaccgggttgggctgtgacgctgctgctggggtcagaatgtcatacccaggctatcccccaacaggctacccacctttccctggatatcctcctgcaggtcaggagtcatcttttcccccttctggtcagtatccttatcctagtggctttcctccaatgggaggaggtgcctacccacaagtgccaagtagtggctacccaggagctggaggctaccctgcgcctggaggttatccagcccctggaggctatcctggtgccccacagccagggggagctccatcctatcccggagttcctccaggccaaggatttggagtcccaccaggtggagcaggcttttctgggtatccacagccaccttcacagtcttatggaggtggtccagcacaggttccactacctggtggctttcctggaggacagatgccttctcagtatcctggaggacaacctacttaccctagtcagatcaatacagattctttttcttcctatcctgttttctctcctgtttctttggattatagcagtgaacctgccacagtgactcaggtcactcaaggaactatccgaccagctgccaacttcgatgctataagagatgcagaaattcttcgtaaggcaatgaagggttttgggacagatgagcaggcaattgtggatgtggtggccaaccgttccaatgatcagaggcaaaaaattaaagcagcatttaagacctcctatggcaaggatttaatcaaagatctcaaatcagagttaagtggaaatatggaagaactgatcctggccctcttcatgcctcctacgtattacgatgcctggagcttacggaaagcaatgcagggagcaggaactcaggaacgtgtattgattgagattttgtgcacaagaacaaatcaggaaatccgagaaattgtcagatgttatcagtcagaatttggacgagaccttgaaaaggacattaggtcagatacatcaggacattttgaacgtttacttgtgtccatgtgccagggaaatcgtgatgagaaccagagtataaaccaccaaatggctcaggaagatgctcagcgtctctatcaagctggtgaggggagactagggaccgatgaatcttgctttaacatgatccttgccacaagaagctttcctcagctgagagctaccatggaggcttattctaggatggctaatcgagacttgttaagcagtgtgagccgtgagttttccggatatgtagaaagtggtttgaagaccatcttgcagtgtgccctgaaccgccctgccttctttgctgagaggctctactatgctatgaaaggtgctggcacagatgactccaccctggtccggattgtggtcactcgaagtgagattgaccttgtacaaataaaacagatgttcgctcagatgtatcagaagactctgggcacaatgattgcaggtgacacgagtggagattaccgaagacttcttctggctattgtgggccagtaggagggatttttttttttttaatgaaaaaaaatttctattcatagcttatccttcagagcaatgacctgcatgcagcaatatcaaacatcagctaaccgaaagagctttctgtcaaggaccgtatcagggtaatgtgcttggtttgcacatgttgttattgccttaattctaattttattttgttctctacatacaatcaatgtaaagccatatcacaatgatacagtaatattgcaatgtttgtaaaccttcattcttactagtttcattctaatcaagatgtcaaattgaataaaaatcacagcaatctctgattctgtgtaataatattgaataattttttagaaggttactgaaagctctgccttccggaatccctctaagtctgcttgatagagtggatagtgtgttaaaactgtgtactttaaaaaaaaattcaacctttacatctagaataatttgcatctcattttgcctaaattggttctgtattcataaacactttccacatagaaaatagattagtattacctgtggcaccttttaagaaagggtcaaatgtttatatgcttaagatacatagcctacttttttttcgcagttgttttctttttttaaattgagttatgacaaataaaaaattgcatatatttaaggtgtacaaaaaaaaaa

SEQ ID NO: 115 - DNA, 10906 bp, Homo sapiens
attggtggaggcggcaagtttaaacagagtcaaaacgccatacttgtttggctcctctttttaatttgcgagtttattgggcttgttttctgttttctagggagtaggttagtggaaaagaaaaagggccgaattcactcccacgacctctacagccgcccctgaggggaagcggtcagcgtaagtcccggatccccgctccggagccgcctcgtgggagcggggcaaggagatccaggaggggtctcgaatctgccatggcgaaccggcgagtggggcgaggctgctgggaagtgagcccgaccgagcggaggccgcccgcggggctgcggggccccgcggccgaggaggaggcgtcttccccgccggtcctgtctctcagccacttctgcaggtctcctttcctttgcttcggggacgttctcctgggagcctcacggacgctgtctctggccctagacaaccctaacgaggaggtggcagaagtgaagatctcccacttcccggccgcggacctgggcttcagtgtgtcgcagcgctgtttcgtgttgcagcctaaagagaaaattgttatttctgttaactggacaccactcaaagaaggccgagtaagagagattatgacatttcttgtaaatgatgttctgaaacaccaagctatattactaggaaatgcagaagagcagaaaaagaaaaagaggagtctttgggataccattaaaaagaagaaaatttcagcctctacaagtcacaacagaagggtttcaaatattcagaatgttaataaaacatttagtgtttcccaaaaagttgacagagttaggagcccactacaagcttgtgaaaacttggctatgaatgaaggcggtcccccaacagaaaacaattctttaatacttgaagaaaataaaatacccatatcacctattagccctgctttcaatgaatgccatggtgcaacttgcttgccactctctgtacgtcgatctactacctactcatctcttcatgcatcagaaaatagggaactattaaatgtacacagtgccaacgtttcaaaagtttcttttaatgagaaagctgtaactgaaacttcctttaattccgtaaatgttaatggccaaagaggagagaatagtaaacttagtcttacccccaactgttcttcaactttgaacattacacaaagccaaatacattttctaagtccagattcttttgtaaataatagtcatggagctaataatgaactagaattagtaacatgtctttcatcagatatgtttatgaaagataattcacagcctgtgcatttggaatcaacaattgcacatgaaatttatcagaaaattttaagtccagattctttcataaaagataattatggactaaatcaggatctagaatcagagtcagttaatcctattttatcccctaatcaatttttaaaagataacatggcatatatgtgtacatctcagcaaacatgtaaagtaccattatcaaatgaaaattctcaagtcccacagtctcctgaagattggagaaaaagtgaagtttcgccacgtattcctgaatgtcagggttcaaaatctcccaaagctatttttgaagaactagtagaaatgaagtcaaattactacagttttataaaacaaaataatcctaaattttctgcagttcaggatatttctagtcatagccacaataaacaacctaagagacgtccaatactttctgccactgttactaaaaggaaggccacctgtaccagagaaaaccaaactgagattaataaaccaaaagcaaaaagatgtctcaacagtgcagtgggtgaacatgaaaaagtaataaataatcaaaaggaaaaagaagattttcattcttatcttccaattatagatccaatattaagtaaatctaagagttataaaaacgaggtaacaccctcttcgacaacagcttcagttgctcggaaaagaaagagcgatggaagcatggaagatgcaaatgtgagagttgcaattacagaacatacagaagtgcgagaaatcaaaagaatccatttttctccctcagagcctaaaacatcagctgttaagaaaacaaaaaatgtgacaacacccatctcaaaacgtattagcaacagagagaaattaaacctgaagaagaaaactgatttatcaatattcagaactccaatttctaaaacaaacaaaaggacaaaacccattatcgctgtggcacagtccagtttgaccttcataaaaccattaaaaacagatattcccagacacccgatgccatttgctgcaaaaaacatgttttatgatgaacgctggaaggaaaagcaggaacagggcttcacttggtggttaaattttatattaacccctgatgacttcactgtaaaaacaaatatttctgaagtaaatgctgctactcttcttttgggaatagagaatcaacataaaataagtgttcctagagcacctacaaaagaggaaatgtctctcagagcttatactgctcggtgtaggttaaacagactacgtcgtgcagcatgccgtttgtttacttctgaaaaaatggttaaagctattaaaaagcttgaaattgaaattgaagctaggcggttaattgttcgaaaagatagacacctatggaaagatgtgggagaacgtcagaaagtcctgaattggctgttgtcctacaatcctttgtggcttcgaattggtctagagacaacttatggagaactcatatctttggaagataacagtgatgtcacagggttggctatgtttattctgaatcgcctactttggaatcctgatatagcagctgagtatagacaccccactgttcctcacctgtatagagatggtcatgaagaagctttgtccaagtttacattgaaaaagttattgttgttggtctgttttcttgattatgctaaaatttccagactcattgatcatgatccttgtctcttctgtaaagatgccgaattcaaggctagtaaagaaatccttttggctttttcacgagatttcctaagtggtgaaggtgacctttcccgtcaccttggcttattgggattacctgttaaccatgttcagacaccatttgatgaatttgattttgccgttacaaatcttgccgtagacttgcaatgtggagtgcgccttgtgcgaaccatggaacttctcacacagaactgggacctctcaaagaaactcaggattccggcaataagtcgtcttcaaaagatgcacaatgttgacattgttcttcaagttcttaaatcacgaggaattgaattaagtgatgagcatggaaatacaattctatctaaggatattgtggataggcacagagaaaaaactctcaggttgctttggaaaatagcgtttgcttttcaggtggatatttcccttaacttagatcaattaaaggaagaaattgcctttctaaaacacacaaagagtataaagaaaacaatatctctactatcatgccattctgatgatcttattaataagaaaaaaggcaaaagggatagtggttcctttgaacaatatagtgaaaacataaagttattgatggattgggtaaatgctgtttgtgccttctataataaaaaggtggagaattttacagtgtctttctcagacggccgtgtgttatgttacctgatccaccattaccatccttgctatgtgccatttgacgctatatgtcagcgtactactcaaactgtggaatgtacgcaaactggttcagtggtattaaattcatcatctgaatctgatgacagttctctggatatgtctcttaaagcatttgatcatgaaaatacttcagagctatacaaagagctcctagaaaatgaaaagaaaaattttcacttggttaggtctgcagttagagaccttggtggaatacctgctatgattaatcattcagatatgtcaaatacaattccagatgaaaaggtggttattacctatttgtcatttctttgtgcaaggcttttggatcttcgtaaagaaataagagctgctcgactcatacaaacaacatggagaaaatataaactaaaaacagatctcaaacgccatcaggagagagagaaagctgcaagaattattcaattggctgtaatcaattttctagcaaaacaaagattgagaaaaagagttaatgcagcactcgtcattcagaaatattggcgaagagtcttagcacagagaaaattattaatgttaaaaaaggaaaagctggaaaaagttcaaaataaagcagcatcacttattcagggatattggagaagatattccactagacaaagatttctgaaattgaaatattattcaatcatcctgcaatctaggataagaatgataattgctgttacatcttataaacgatatctttgggctacagttacaattcagaggcattggcgtgcttatttaagaagaaaacaagatcaacaaagatatgaaatgctaaaatcatcaactcttataatccaatctatgttcagaaaatggaagcaacgtaaaatgcaatcacaagtaaaagctacagtaatattgcaaagagcttttagagaatggcatttaagaaaacaagctaaagaagaaaattctgctattatcatacaatcatggtatagaatgcataaagaattacggaaatatatttatattagatcttgtgttgttatcattcagaaaagatttcggtgctttcaagcccaaaagttatataaaagaagaaaagagtccatactaaccatccagaagtactacaaagcatatctgaaaggaaagattgagcgcaccaactatttgcagaaacgagctgcagccattcaattacaagctgcttttaggagactgaaagctcataatttatgtagacaaattagagctgcttgtgttattcagtcatactggagaatgagacaagacagagttcgatttttaaaccttaagaagactattatcaaatttcaggcacatgtaagaaaacatcaacaacgacagaaatataagaagatgaagaaagcagctgttataattcagactcatttccgagcttatatttttgccatgaaagttctagcatcttaccagaaaacacgctctgctgtcattgtgctgcagtctgcatatagagggatgcaagccaggaaaatgtatattcacatcctcacatctgttataaagattcaatcatattatcgtgcttatgtttctaaaaaggaatttttgagcctaaaaaatgctacaataaaattgcagtcaactgttaagatgaaacaaacacgtaaacaatatttgcatttaagagcagctgcactatttatccagcaatgttaccgttccaaaaaaatagctgcacaaaagagagaagagtatatgcagatgcgggaatcttgtatcaaactgcaagcatttgttagaggataccttgtccgaaagcagatgaggttacaaagaaaagctgttatttcactacagtcttatttcagaatgagaaaggctcggcagtattatctgaaaatgtataaagcaattattgtcattcagaattactatcatgcatacaaagcacaggtcaatcagaggaagaacttcttgcaagtcaaaaaagcagctacttgcttgcaagcagcttacagaggttataaagtacgccagctaatcaaacaacaatctatagctgctcttaaaattcagtctgcttttagaggctataataaaagggtaaaatatcaatctgtgcttcaatctataataaagattcagagatggtacagggcgtacaagactcttcatgatacaagaacacattttttgaagacaaaggcagctgtgatttccctccagtctgcttatcgtggctggaaggttcggaaacagattagaagggaacatcaagctgccttgaagattcagtctgcttttagaatggccaaggcccagaaacagtttagattgtttaaaacagcagcattagtcatccagcaaaatttcagagcatggactgcaggaaggaagcaatgtatggagtatattgaactccgtcatgcggtactggtgcttcaatctatgtggaagggaaaaacactgagaagacagcttcaaaggcaacataaatgtgctatcatcatacagtcatactatagaatgcatgtgcaacaaaagaagtggaaaatcatgaaaaaagctgctcttctgattcaaaagtattatagggcttacagtattggaagagaacagaatcatttatatttgaaaacaaaagcagctgtagtaactttacagtcagcttatcgtggtatgaaagtgagaaaaagaataaaggattgcaacaaagcagcagtcactatacagtctaaatacagagcttacaaaaccaaaaagaaatatgcaacctatagagcttcagctattataattcagagatggtatcgaggtattaaaattacaaaccatcagcataaggagtatcttaatttgaagaagacagcaattaaaatccaatctgtttatagaggtattagagttagaagacatattcaacacatgcacagggcagccacttttattaaagccatgtttaaaatgcatcagtcaagaataagttaccatacaatgagaaaagcagctattgttattcaagtaagatgtagagcatattatcaaggtaaaatgcagcgtgaaaagtacctgacaattttgaaagctgttaaagtccttcaggcaagttttagaggagtaagagttagacggactcttagaaagatgcagactgcagcaacactcattcagtcaaactacagaagatacagacagcaaacatactttaataagttaaagaaaataacaaaaacagtacagcaaagatactgggcaatgaaagaaagaaacatacaatttcaaaggtataacaaactgaggcattctgtaatatacattcaggctatttttaggggaaagaaagctagaagacatttaaaaatgatgcatatagccgcaactctcattcagaggagatttagaactctaatgatgagaagaagattcctctctctcaagaaaactgctattttgattcagagaaaatatcgggcacatctttgtacaaagcatcacttacagttccttcaggtacaaaatgcagttattaaaatccagtcatcatacagaagatggatgataaggaaaaggatgcgagagatgcacagggctgctactttcatccagtctactttcagaatgcacagattacatatgagatatcaggctttgaaacaggcctccgttgtgatccaacagcaataccaagcaaatagagctgcaaaactgcagaggcagcattatctcagacaaagacactctgctgtgatccttcaggctgcattcaggggtatgaaaactagaagacatttgaagagtatgcattcctctgcaacccttattcagagtaggtttagatcattactggtgaggagaagattcatttccctcaaaaaagctactatttttgttcagaggaaatatcgagccaccatttgtgccaaacataaattgtaccaattcttgcacttaagaaaggcagccattacaatacagtcatcttacagaagactgatggtaaagaagaagttacaagaaatgcaaagggctgcagttctcattcaggctactttcaggatgtacagaacatatattacatttcagacttggaaacatgcttcaattctaattcagcaacattatcgaacatatagagctgcaaaattacaaagagaaaattatatcagacaatggcattctgctgtggttattcaggctgcatataaaggaatgaaagcaagacaacttttaagggaaaaacacaaagcttctatcgtaatacaaagcacctacagaatgtataggcagtattgtttctaccaaaagcttcagtgggctacaaaaatcatacaagaaaaatatagagcaaataaaaagaaacagaaagtatttcaacacaatgaacttaagaaagagacttgtgttcaggcaggttttcaggacatgaacataaaaaaacagattcaggaacagcaccaggctgccattattattcagaagcattgtaaagcctttaaaataaggaagcattatctccaccttagagcaacagtagtttctattcaaagaagatacagaaaactaactgcagtgcgtacccaagcagttatttgtatacagtcttattacagaggctttaaagtacgaaaggatattcaaaatatgcaccgggctgccacactaattcagtcattctatcgaatgcacagggccaaagttgattatgaaacaaagaaaactgcaattgtggttatacagaattattataggttgtatgttagagtaaaaacagaaagaaaaaactttttagcagttcagaaatctgtacgaactattcaggctgcttttagaggcatgaaagttagacaaaaattgaaaaatgtatcagaggaaaagatggcagccattgttaaccaatctgcactctgctgttacagaagtaaaactcagtatgaagctgttcaaagtgaaggtgttatgattcaagagtggtataaagcttctggccttgcttgttcacaggaagcagagtatcattctcaaagtagggctgcagtaacaattcaaaaagctttttgtagaatggtcacaagaaaactggaaacacagaaatgtgctgccctacggattcagttcttccttcagatggctgtgtatcggagaagatttgttcagcagaaaagagctgctatcactttacagcattattttaggacgtggcaaaccagaaaacagtttttactatatagaaaagcagcagtggttttacaaaatcactacagagcatttctgtctgcaaaacatcaaagacaagtctatttacagatcagaagcagtgttatcattattcaagctagaagtaaaggatttatacagaaacggaagtttcaggaaattaaaaatagcaccataaaaattcaggctatgtggaggagatatagagccaagaaatatttatgtaaagtgaaagctgcctgcaagattcaagcctggtatagatgttggagagcacacaaagaatatctagctatattaaaagctgttaaaattattcaaggttgcttctataccaaactagagagaacacggtttttgaatgtgagagcatcagcaattatcattcagagaaaatggagagctatacttcctgcaaagatagctcatgaacacttcttaatgataaaaagacatcgagctgcttgtttgatccaagcacattatagaggatataaaggaaggcaggtctttcttcggcagaaatctgctgctttgatcatacaaaaatatatacgagccagggaggctggaaagcatgaaaggataaaatatattgaatttaaaaaatctacagttatcctacaagcactggtgcgtggttggctagtacgaaaaagatttttagaacagagagccaaaattcgacttcttcacttcactgcagctgcatattatcacctgaatgctgttagaattcaaagagcctataaactttacctggctgtgaagaatgctaacaagcaggttaattcagtcatctgtattcagagatggtttcgagcaagattacaagaaaagagatttattcagaaatatcatagcatcaaaaagattgagcatgaaggtcaagaatgtctgagccagcgaaatagggctgcatcagtaatacagaaagcagtgcgccattttctcctccgtaaaaagcaggaaaaattcactagtggaatcattaaaattcaggcattatggagaggctattcttggaggaagaaaaatgattgtacaaaaattaaagctatacgactaagtcttcaagttgttaatagggagattcgagaagaaaacaaactctacaaaagaactgcacttgcacttcattaccttttgacatataagcacctttctgccattcttgaggccttaaaacacctagaggtagttactagattgtctccactttgttgtgagaacatggcccagagtggagcaatttctaaaatatttgttttgatccgaagttgtaatcgcagtattccttgtatggaagtcatcagatatgctgtgcaagtcttgcttaatgtatctaagtatgagaaaactacttcagcagtttatgatgtagaaaattgtatagatatactattggagcttttgcagatataccgagaaaagcctggtaataaagttgcagacaaaggcggaagcatttttacaaaaacttgttgtttgttggctattttactgaagacaacaaatagagcctctgatgtacgaagtaggtccaaagttgttgaccgtatttacagtctctacaaacttacagctcataaacataaaatgaatactgaaagaatactttacaagcaaaagaagaattcttctataagcattccttttatcccagaaacacctgtaaggaccagaatagtttcaagacttaagccagattgggttttgagaagagataacatggaagaaatcacaaatcccctgcaagctattcaaatggtgatggatacgcttggcattccttattagtaaatgtaaacattttcagtatgtatagtgtaaagaaatattaaagccaatcatgagtacgtaaagtgatttttgctctccgtgtacaacttttaaaatctgactttgttttaaaaaaacataaactgttcattacattcttcatttttatcatttatagttttatgcatgtaataaactaatatgtcataagatgaaaaaaaaaaaaaaaaaaa

SEQ ID NO: 116 - DNA, 5853 bp, Homo sapiens
ggaagcactcggcaatcgctcggcctcccccatcccccggtaacggtcgctggtgagtttaaatgagcaggggctggccgggccggagccgctacagggggggcctgaggcactgcagaaagtgggcctgagcctcgaggatgacggtgctgcaggaacccgtccaggctgctatatggcaagcactaaaccactatgcttaccgagatgcggttttcctcgcagaacgcctttatgcagaagtacactcagaagaagccttgtttttactggcaacctgttattaccgctcaggaaaggcatataaagcatatagactcttgaaaggacacagttgtactacaccgcaatgcaaatacctgcttgcaaaatgttgtgttgatctcagcaagcttgcagaaggggaacaaatcttatctggtggagtgtttaataagcagaaaagccatgatgatattgttactgagtttggtgattcagcttgctttactctttcattgttgggacatgtatattgcaagacagatcggcttgccaaaggatcagaatgttaccaaaagagccttagtttaaatcctttcctctggtctccctttgaatcattatgtgaaataggtgaaaagccagatcctgaccaaacatttaaattcacatctttacagaactttagcaactgtctgcccaactcttgcacaacacaagtacctaatcatagtttatctcacagacagcctgagacagttcttacggaaacaccccaggacacaattgaattaaacagattgaatttagaatcttccaattcaaagtactccttgaatacagattcctcagtgtcttatattgattcagctgtaatttcacctgatactgtcccactgggaacaggaacttccatattatctaaacaggttcaaaataaaccaaaaactggtcgaagtttattaggaggaccagcagctcttagtccattaaccccaagttttgggattttgccattagaaaccccaagtcctggagatggatcctatttacaaaactacactaatacacctcctgtaattgatgtgccatccaccggagccccttcaaaaaagtctgttgccagaatcggccaaactggaacaaagtctgtcttctcacagagtggaaatagccgagaggtaactccaattcttgcacaaacacaaagttctggtccacaaacaagtacaacacctcaggtattgagccccactattacatctcccccaaacgcactgcctcgaagaagttcacgactctttactagtgacagctccacaaccaaggagaatagcaaaaaattaaaaatgaagtttccacctaaaatcccaaacagaaaaacaaaaagtaaaactaataaaggaggaataactcaacctaacataaatgatagcctggaaattacaaaattggactcttccatcatttcagaagggaaaatatccacaatcacacctcagattcaggcctttaatctacaaaaagcagcagcagaaggtttgatgagccttcttcgtgaaatggggaaaggttatttagctttgtgttcatacaactgcaaagaagctataaatattttgagccatctaccttctcaccactacaatactggttgggtactgtgccaaattggaagggcctattttgaactttcagagtacatgcaagctgaaagaatattctcagaggttagaaggattgagaattatagagttgaaggcatggagatctactctacaacactttggcatcttcaaaaagatgttgctctttcagttctgtcaaaagacttaacagacatggataaaaattcgccagaggcctggtgtgctgcagggaactgtttcagtctgcaacgggaacatgatattgcaattaaattcttccagagagctatccaagttgatccaaattacgcttatgcctatactctattagggcatgagtttgtcttaactgaagaattggacaaagcattagcttgttttcgaaatgctatcagagtcaatcctagacattataatgcatggtatggtttaggaatgatttattacaagcaagaaaaattcagccttgcagaaatgcatttccaaaaagcgcttgatatcaaccctcaaagttcagttttactttgccacattggagtagttcaacatgcactgaaaaaatcagagaaggctttggataccctaaacaaagccattgtcattgatcccaagaaccctctatgcaaatttcacagagcctcagttttatttgcaaatgaaaaatataagtctgctttacaagaacttgaagaattgaaacaaattgttcccaaagaatccctcgtttacttcttaataggaaaggtttacaagaagttaggtcaaacgcacctcgccctgatgaatttctcttgggctatggatttagatcctaaaggagccaataaccagattaaagaggcaattgataagcgttatcttccagatgatgaggagccaataacccaagaagaacagatcatgggaacagatgaatcccaggagagcagcatgacagatgcggatgacacacaacttcatgcagctgaaagtgatgaattttaacttctggaaatcagacttttacaactggatgtgtgactagtgctgacgtgtttcttgtccctctgtatactgagtctttactcttgagctggcggtgtcatcgtccgtcacttataccatgagtgtgccactttcattggaccctgactgtatacagaatgaaaggcagtgcaatatttagctgctaacaagactggctcttttaccagtatgaatgacaatttatggggggtagggtggggaactttcttttctgtttttctttaatctccctttgttggaaagtatcatgaaaggaagagttatgctttatcttgaaggaaccattagatatggaaaatagtgatgaaccagagtttcttggttgctttttcaaaaatttgtttttatttggttctgttcctgataaacagagtaactgaccttcatttctaggttcttcaagaatggtgtttgcaagtgccagatggaacaataaaagacgttgcctataacagtgacttgattgccaaggaatgtaaattaccttaaacttgcagtatctcccataaacaaatgtaatgggcatattgggactcgtatgtaggaatcaaatatccctccatacagtgtactcttattcttggcaagaatgctttaatgtctaaccaagaattttaatttattcatcttgcttcaaagtgttgatcattgttgtcttggtattgcaaactttaaaattgtttcttaccatattgcctcttctctttgagctctgtgggatcacctttaacattcagagatgatagagtggttccccactgagaagccaaaacaaggcccttaataaccccttaagttcaccatatgaatcagaaggagaacactaaagtggagagacttttaagagatcatgatagtgaaagccttaatataatcagaattgtaccataaccttgaatctatatttgttcaaaacatccctttgacttttctaagtgtttgcttaagcagagtgtaagaatgtgtggttacctttggttgagatcctttccattctttttgactctctgcttcagattttttcagtagtgtgagtcaccaaaacatttactaagagtaattgggtttaggatgttggaaatttttagcttgggggaaaaaacattcttatgaaggagataggttctcttctgagtttgtcataatatagattggtgtctttggaaaatggccacaattttaagaattcaattatgcatataaaatgataattattggaattccacagtaacagatttaaacagtcttaaattgtttatctcctttactgtaatgtattgaaatttttagagaaattttagttgttaacattttattaagtgccagtgtcagaatataacaaattatagtttcttatgaatgacaggcctacagttattattctggattatttgatggaggacaaacttacctgtatttgttagtcaagctgtgaaaataaggtggattacaaaagatgtgaaaaaaattttagtctgtagactcagtaattttctataatttactgttaatctcatttgaacatggattaggtacaatttataaattaattcaagtcagggtctttaggtatcaggtgccagagagatatttaacagatttccctacctaaatttatgtatatgtactgtctaaaacaatacttttttaaaaaaaaggaacagttgggagaaaataaatataatgaaaaattcccagaggctagcacttggattctaacacgtatgctattgtattatccattagttctgtaatatttaattttagattcttttatttttttaattggcaaagcacaaggtgctgtataacagtgtcatttagagttttatagaaagcttcaacctgagttctgcgttataaagcctggagaaagctaagcttagaacataacttgctgaagtataattatctttttgtagcaggaatttatgtgccagaggtgagagtctttctggtactgattttttgagaccaaggataaaaggatcgttttgtaagacatgccatggcaatggctggttgggggacagtttccgcccaagcttggcctattttatttttcctcatacctactttcaaagtcatttaggtatttgaagccttatttcccacgtagtaacactttctggcttttgcagtttctttttttgtttggttttgttttttgcatggaatggggatcaaacaacccgaagaagaacacattttgatcaagcaaaatgtttgcttcaaatttcagaagtttattttacagaaattaaattaagtagtttgacatccttttctctgtttcacacatatattaggttggtgcataagtaattgtggtttttgccatgacttttatggcaaaacctgcaattacttttgcaccaacttaatacatctatatacatatatatatacgcgcacacacttgttcagaagttatgttgtggccttggatttgtttttccccttggaaatggttcttaactctgggattttagaaggttagaatattttttcaagagaacagtggtactcaaaagaatgaaaggtggtccctacattttctgtattcatcacttaaaatttttaatttttccgagaactacaagtaacatttgaaccatgctgctgttgtaccttaaacaaaaactcagtgataaccagtatttagtctattaaaaatgctctttttgaagaaaaaagtttggaagtctctgattagccagagtatagtatgagtcttcactgagaaatatggtgacccattttctttgtgaaaacctgggaaaatgcaagtgtgggtatgaagtgtgtgttctgtttgcattgaaacaatgtaattttgtgtcttctttttgctttaactgacttatttcagaaattgtacagtgttgagggggaaagtcttttctgttaatatatttgcaattcattaaaggatatggaaaatccaaataagttacttttgaaagcaatttataatcaagttgttaaagctatatgaaagctgtgccatctgtattttaataagaaggcacagaaaaacagagatacagttttatgtttcacaaaaaactagagcaatgtttatctaattttttaaaacttacactcttaatatatttatatttttaaacggtcatactcttttttagtattatttggaatatcaaaataaatactatgacaaaaacaatggtaa

SEQ ID NO: 117 - DNA, 5850 bp, Homo sapiens
ggaagcactcggcaatcgctcggcctcccccatcccccggtaacggtcgctggtgagtttaaatgagcaggggctggccgggccggagccgctacagggggggcctgaggcactgcagaaagtgggcctgagcctcgaggatgacggtgctgcaggaacccgtccaggctgctatatggcaagcactaaaccactatgcttaccgagatgcggttttcctcgcagaacgcctttatgcagaagtacactcagaagaagccttgtttttactggcaacctgttattaccgctcaggaaaggcatataaagcatatagactcttgaaaggacacagttgtactacaccgcaatgcaaatacctgcttgcaaaatgttgtgttgatctcagcaagcttgcagaaggggaacaaatcttatctggtggagtgtttaataagcagaaaagccatgatgatattgttactgagtttggtgattcagcttgctttactctttcattgttgggacatgtatattgcaagacagatcggcttgccaaaggatcagaatgttaccaaaagagccttagtttaaatcctttcctctggtctccctttgaatcattatgtgaaataggtgaaaagccagatcctgaccaaacatttaaattcacatctttacagaactttagcaactgtctgcccaactcttgcacaacacaagtacctaatcatagtttatctcacagacagcctgagacagttcttacggaaacaccccaggacacaattgaattaaacagattgaatttagaatcttccaattcaaagtactccttgaatacagattcctcagtgtcttatattgattcagctgtaatttcacctgatactgtcccactgggaacaggaacttccatattatctaaacaggttcaaaataaaccaaaaactggtcgaagtttattaggaggaccagcagctcttagtccattaaccccaagttttgggattttgccattagaaaccccaagtcctggagatggatcctatttacaaaactacactaatacacctcctgtaattgatgtgccatccaccggagccccttcaaaaaagtctgttgccagaatcggccaaactggaacaaagtctgtcttctcacagagtggaaatagccgagaggtaactccaattcttgcacaaacacaaagttctggtccacaaacaagtacaacacctcaggtattgagccccactattacatctcccccaaacgcactgcctcgaagaagttcacgactctttactagtgacagctccacaaccaaggagaatagcaaaaaattaaaaatgaagtttccacctaaaatcccaaacagaaaaacaaaaagtaaaactaataaaggaggaataactcaacctaacataaatgatagcctggaaattacaaaattggactcttccatcatttcagaagggaaaatatccacaatcacacctcagattcaggcctttaatctacaaaaagcagcagcaggtttgatgagccttcttcgtgaaatggggaaaggttatttagctttgtgttcatacaactgcaaagaagctataaatattttgagccatctaccttctcaccactacaatactggttgggtactgtgccaaattggaagggcctattttgaactttcagagtacatgcaagctgaaagaatattctcagaggttagaaggattgagaattatagagttgaaggcatggagatctactctacaacactttggcatcttcaaaaagatgttgctctttcagttctgtcaaaagacttaacagacatggataaaaattcgccagaggcctggtgtgctgcagggaactgtttcagtctgcaacgggaacatgatattgcaattaaattcttccagagagctatccaagttgatccaaattacgcttatgcctatactctattagggcatgagtttgtcttaactgaagaattggacaaagcattagcttgttttcgaaatgctatcagagtcaatcctagacattataatgcatggtatggtttaggaatgatttattacaagcaagaaaaattcagccttgcagaaatgcatttccaaaaagcgcttgatatcaaccctcaaagttcagttttactttgccacattggagtagttcaacatgcactgaaaaaatcagagaaggctttggataccctaaacaaagccattgtcattgatcccaagaaccctctatgcaaatttcacagagcctcagttttatttgcaaatgaaaaatataagtctgctttacaagaacttgaagaattgaaacaaattgttcccaaagaatccctcgtttacttcttaataggaaaggtttacaagaagttaggtcaaacgcacctcgccctgatgaatttctcttgggctatggatttagatcctaaaggagccaataaccagattaaagaggcaattgataagcgttatcttccagatgatgaggagccaataacccaagaagaacagatcatgggaacagatgaatcccaggagagcagcatgacagatgcggatgacacacaacttcatgcagctgaaagtgatgaattttaacttctggaaatcagacttttacaactggatgtgtgactagtgctgacgtgtttcttgtccctctgtatactgagtctttactcttgagctggcggtgtcatcgtccgtcacttataccatgagtgtgccactttcattggaccctgactgtatacagaatgaaaggcagtgcaatatttagctgctaacaagactggctcttttaccagtatgaatgacaatttatggggggtagggtggggaactttcttttctgtttttctttaatctccctttgttggaaagtatcatgaaaggaagagttatgctttatcttgaaggaaccattagatatggaaaatagtgatgaaccagagtttcttggttgctttttcaaaaatttgtttttatttggttctgttcctgataaacagagtaactgaccttcatttctaggttcttcaagaatggtgtttgcaagtgccagatggaacaataaaagacgttgcctataacagtgacttgattgccaaggaatgtaaattaccttaaacttgcagtatctcccataaacaaatgtaatgggcatattgggactcgtatgtaggaatcaaatatccctccatacagtgtactcttattcttggcaagaatgctttaatgtctaaccaagaattttaatttattcatcttgcttcaaagtgttgatcattgttgtcttggtattgcaaactttaaaattgtttcttaccatattgcctcttctctttgagctctgtgggatcacctttaacattcagagatgatagagtggttccccactgagaagccaaaacaaggcccttaataaccccttaagttcaccatatgaatcagaaggagaacactaaagtggagagacttttaagagatcatgatagtgaaagccttaatataatcagaattgtaccataaccttgaatctatatttgttcaaaacatccctttgacttttctaagtgtttgcttaagcagagtgtaagaatgtgtggttacctttggttgagatcctttccattctttttgactctctgcttcagattttttcagtagtgtgagtcaccaaaacatttactaagagtaattgggtttaggatgttggaaatttttagcttgggggaaaaaacattcttatgaaggagataggttctcttctgagtttgtcataatatagattggtgtctttggaaaatggccacaattttaagaattcaattatgcatataaaatgataattattggaattccacagtaacagatttaaacagtcttaaattgtttatctcctttactgtaatgtattgaaatttttagagaaattttagttgttaacattttattaagtgccagtgtcagaatataacaaattatagtttcttatgaatgacaggcctacagttattattctggattatttgatggaggacaaacttacctgtatttgttagtcaagctgtgaaaataaggtggattacaaaagatgtgaaaaaaattttagtctgtagactcagtaattttctataatttactgttaatctcatttgaacatggattaggtacaatttataaattaattcaagtcagggtctttaggtatcaggtgccagagagatatttaacagatttccctacctaaatttatgtatatgtactgtctaaaacaatacttttttaaaaaaaaggaacagttgggagaaaataaatataatgaaaaattcccagaggctagcacttggattctaacacgtatgctattgtattatccattagttctgtaatatttaattttagattcttttatttttttaattggcaaagcacaaggtgctgtataacagtgtcatttagagttttatagaaagcttcaacctgagttctgcgttataaagcctggagaaagctaagcttagaacataacttgctgaagtataattatctttttgtagcaggaatttatgtgccagaggtgagagtctttctggtactgattttttgagaccaaggataaaaggatcgttttgtaagacatgccatggcaatggctggttgggggacagtttccgcccaagcttggcctattttatttttcctcatacctactttcaaagtcatttaggtatttgaagccttatttcccacgtagtaacactttctggcttttgcagtttctttttttgtttggttttgttttttgcatggaatggggatcaaacaacccgaagaagaacacattttgatcaagcaaaatgtttgcttcaaatttcagaagtttattttacagaaattaaattaagtagtttgacatccttttctctgtttcacacatatattaggttggtgcataagtaattgtggtttttgccatgacttttatggcaaaacctgcaattacttttgcaccaacttaatacatctatatacatatatatatacgcgcacacacttgttcagaagttatgttgtggccttggatttgtttttccccttggaaatggttcttaactctgggattttagaaggttagaatattttttcaagagaacagtggtactcaaaagaatgaaaggtggtccctacattttctgtattcatcacttaaaatttttaatttttccgagaactacaagtaacatttgaaccatgctgctgttgtaccttaaacaaaaactcagtgataaccagtatttagtctattaaaaatgctctttttgaagaaaaaagtttggaagtctctgattagccagagtatagtatgagtcttcactgagaaatatggtgacccattttctttgtgaaaacctgggaaaatgcaagtgtgggtatgaagtgtgtgttctgtttgcattgaaacaatgtaattttgtgtcttctttttgctttaactgacttatttcagaaattgtacagtgttgagggggaaagtcttttctgttaatatatttgcaattcattaaaggatatggaaaatccaaataagttacttttgaaagcaatttataatcaagttgttaaagctatatgaaagctgtgccatctgtattttaataagaaggcacagaaaaacagagatacagttttatgtttcacaaaaaactagagcaatgtttatctaattttttaaaacttacactcttaatatatttatatttttaaacggtcatactcttttttagtattatttggaatatcaaaataaatactatgacaaaaacaatggtaa

SEQ ID NO: 118 - DNA, 5705 bp, Homo sapiens
ggaagcactcggcaatcgctcggcctcccccatcccccggtaacggtcgctggtgagtttaaatgagcaggggctggccgggccggagccgctacagggggggcctgaggcactgcagaaagtgggcctgagcctcgaggatgacggtgctgcaggaacccgtccaggctgctatatggcaagcactaaaccactatgcttaccgagatgcggttttcctcgcagaacgcctttatgcagaaggcttgcagaaggggaacaaatcttatctggtggagtgtttaataagcagaaaagccatgatgatattgttactgagtttggtgattcagcttgctttactctttcattgttgggacatgtatattgcaagacagatcggcttgccaaaggatcagaatgttaccaaaagagccttagtttaaatcctttcctctggtctccctttgaatcattatgtgaaataggtgaaaagccagatcctgaccaaacatttaaattcacatctttacagaactttagcaactgtctgcccaactcttgcacaacacaagtacctaatcatagtttatctcacagacagcctgagacagttcttacggaaacaccccaggacacaattgaattaaacagattgaatttagaatcttccaattcaaagtactccttgaatacagattcctcagtgtcttatattgattcagctgtaatttcacctgatactgtcccactgggaacaggaacttccatattatctaaacaggttcaaaataaaccaaaaactggtcgaagtttattaggaggaccagcagctcttagtccattaaccccaagttttgggattttgccattagaaaccccaagtcctggagatggatcctatttacaaaactacactaatacacctcctgtaattgatgtgccatccaccggagccccttcaaaaaagtctgttgccagaatcggccaaactggaacaaagtctgtcttctcacagagtggaaatagccgagaggtaactccaattcttgcacaaacacaaagttctggtccacaaacaagtacaacacctcaggtattgagccccactattacatctcccccaaacgcactgcctcgaagaagttcacgactctttactagtgacagctccacaaccaaggagaatagcaaaaaattaaaaatgaagtttccacctaaaatcccaaacagaaaaacaaaaagtaaaactaataaaggaggaataactcaacctaacataaatgatagcctggaaattacaaaattggactcttccatcatttcagaagggaaaatatccacaatcacacctcagattcaggcctttaatctacaaaaagcagcagcagaaggtttgatgagccttcttcgtgaaatggggaaaggttatttagctttgtgttcatacaactgcaaagaagctataaatattttgagccatctaccttctcaccactacaatactggttgggtactgtgccaaattggaagggcctattttgaactttcagagtacatgcaagctgaaagaatattctcagaggttagaaggattgagaattatagagttgaaggcatggagatctactctacaacactttggcatcttcaaaaagatgttgctctttcagttctgtcaaaagacttaacagacatggataaaaattcgccagaggcctggtgtgctgcagggaactgtttcagtctgcaacgggaacatgatattgcaattaaattcttccagagagctatccaagttgatccaaattacgcttatgcctatactctattagggcatgagtttgtcttaactgaagaattggacaaagcattagcttgttttcgaaatgctatcagagtcaatcctagacattataatgcatggtatggtttaggaatgatttattacaagcaagaaaaattcagccttgcagaaatgcatttccaaaaagcgcttgatatcaaccctcaaagttcagttttactttgccacattggagtagttcaacatgcactgaaaaaatcagagaaggctttggataccctaaacaaagccattgtcattgatcccaagaaccctctatgcaaatttcacagagcctcagttttatttgcaaatgaaaaatataagtctgctttacaagaacttgaagaattgaaacaaattgttcccaaagaatccctcgtttacttcttaataggaaaggtttacaagaagttaggtcaaacgcacctcgccctgatgaatttctcttgggctatggatttagatcctaaaggagccaataaccagattaaagaggcaattgataagcgttatcttccagatgatgaggagccaataacccaagaagaacagatcatgggaacagatgaatcccaggagagcagcatgacagatgcggatgacacacaacttcatgcagctgaaagtgatgaattttaacttctggaaatcagacttttacaactggatgtgtgactagtgctgacgtgtttcttgtccctctgtatactgagtctttactcttgagctggcggtgtcatcgtccgtcacttataccatgagtgtgccactttcattggaccctgactgtatacagaatgaaaggcagtgcaatatttagctgctaacaagactggctcttttaccagtatgaatgacaatttatggggggtagggtggggaactttcttttctgtttttctttaatctccctttgttggaaagtatcatgaaaggaagagttatgctttatcttgaaggaaccattagatatggaaaatagtgatgaaccagagtttcttggttgctttttcaaaaatttgtttttatttggttctgttcctgataaacagagtaactgaccttcatttctaggttcttcaagaatggtgtttgcaagtgccagatggaacaataaaagacgttgcctataacagtgacttgattgccaaggaatgtaaattaccttaaacttgcagtatctcccataaacaaatgtaatgggcatattgggactcgtatgtaggaatcaaatatccctccatacagtgtactcttattcttggcaagaatgctttaatgtctaaccaagaattttaatttattcatcttgcttcaaagtgttgatcattgttgtcttggtattgcaaactttaaaattgtttcttaccatattgcctcttctctttgagctctgtgggatcacctttaacattcagagatgatagagtggttccccactgagaagccaaaacaaggcccttaataaccccttaagttcaccatatgaatcagaaggagaacactaaagtggagagacttttaagagatcatgatagtgaaagccttaatataatcagaattgtaccataaccttgaatctatatttgttcaaaacatccctttgacttttctaagtgtttgcttaagcagagtgtaagaatgtgtggttacctttggttgagatcctttccattctttttgactctctgcttcagattttttcagtagtgtgagtcaccaaaacatttactaagagtaattgggtttaggatgttggaaatttttagcttgggggaaaaaacattcttatgaaggagataggttctcttctgagtttgtcataatatagattggtgtctttggaaaatggccacaattttaagaattcaattatgcatataaaatgataattattggaattccacagtaacagatttaaacagtcttaaattgtttatctcctttactgtaatgtattgaaatttttagagaaattttagttgttaacattttattaagtgccagtgtcagaatataacaaattatagtttcttatgaatgacaggcctacagttattattctggattatttgatggaggacaaacttacctgtatttgttagtcaagctgtgaaaataaggtggattacaaaagatgtgaaaaaaattttagtctgtagactcagtaattttctataatttactgttaatctcatttgaacatggattaggtacaatttataaattaattcaagtcagggtctttaggtatcaggtgccagagagatatttaacagatttccctacctaaatttatgtatatgtactgtctaaaacaatacttttttaaaaaaaaggaacagttgggagaaaataaatataatgaaaaattcccagaggctagcacttggattctaacacgtatgctattgtattatccattagttctgtaatatttaattttagattcttttatttttttaattggcaaagcacaaggtgctgtataacagtgtcatttagagttttatagaaagcttcaacctgagttctgcgttataaagcctggagaaagctaagcttagaacataacttgctgaagtataattatctttttgtagcaggaatttatgtgccagaggtgagagtctttctggtactgattttttgagaccaaggataaaaggatcgttttgtaagacatgccatggcaatggctggttgggggacagtttccgcccaagcttggcctattttatttttcctcatacctactttcaaagtcatttaggtatttgaagccttatttcccacgtagtaacactttctggcttttgcagtttctttttttgtttggttttgttttttgcatggaatggggatcaaacaacccgaagaagaacacattttgatcaagcaaaatgtttgcttcaaatttcagaagtttattttacagaaattaaattaagtagtttgacatccttttctctgtttcacacatatattaggttggtgcataagtaattgtggtttttgccatgacttttatggcaaaacctgcaattacttttgcaccaacttaatacatctatatacatatatatatacgcgcacacacttgttcagaagttatgttgtggccttggatttgtttttccccttggaaatggttcttaactctgggattttagaaggttagaatattttttcaagagaacagtggtactcaaaagaatgaaaggtggtccctacattttctgtattcatcacttaaaatttttaatttttccgagaactacaagtaacatttgaaccatgctgctgttgtaccttaaacaaaaactcagtgataaccagtatttagtctattaaaaatgctctttttgaagaaaaaagtttggaagtctctgattagccagagtatagtatgagtcttcactgagaaatatggtgacccattttctttgtgaaaacctgggaaaatgcaagtgtgggtatgaagtgtgtgttctgtttgcattgaaacaatgtaattttgtgtcttctttttgctttaactgacttatttcagaaattgtacagtgttgagggggaaagtcttttctgttaatatatttgcaattcattaaaggatatggaaaatccaaataagttacttttgaaagcaatttataatcaagttgttaaagctatatgaaagctgtgccatctgtattttaataagaaggcacagaaaaacagagatacagttttatgtttcacaaaaaactagagcaatgtttatctaattttttaaaacttacactcttaatatatttatatttttaaacggtcatactcttttttagtattatttggaatatcaaaataaatactatgacaaaaacaatggtaa

SEQ ID NO: 119 - DNA, 7324 bp, Homo sapiens
tttccaggttaactaaggtctcagctgtaaaccaaaagtgagaggagacattaagattttcattcttaccgggttgtcttcttcctgaagagcaatggagccgcttttacttggaagaggactaatcgtatatctaatgttcctcctgttaaaattctcaaaagcaattgaaataccatcttcagttcaacaggttccaacaatcataaaacagtcaaaagtccaagttgcctttcccttcgatgagtattttcaaattgaatgtgaagctaaaggaaatccagaaccaacattttcgtggactaaggatggcaaccctttttatttcactgaccatcggataattccatcgaacaattcaggaacattcaggatcccaaacgaggggcacatatctcactttcaagggaaataccgctgctttgcttcaaataaactgggaatcgctatgtcagaagaaatagaatttatagttccaagtgttccaaaattcccaaaagaaaaaattgaccctcttgaagtggaggagggagatccaattgtcctcccatgcaatcctcccaaaggcctcccacctttacacatttattggatgaatattgaattagaacacatcgaacaagatgaaagagtatacatgagccaaaagggagatctatacttcgcaaacgtggaagaaaaggacagtcgcaatgactactgttgctttgctgcatttccaagattaaggactattgtacagaaaatgccaatgaaactaacagttaacagtttaaagcatgctaatgactcaagttcatccacagaaattggttccaaggcaaattccatcaagcaaagaaaacccaaactgctgttgcctcccactgagagtggcagtgagtcttcaattaccatcctcaaaggggaaatcttgctgcttgagtgttttgctgaaggcttgccaactccacaggttgattggaacaaaattggtggtgacttaccaaaggggagagaaacaaaagaaaattatggcaagactttgaagatagagaatgtctcctaccaggacaaaggaaattatcgctgcacagccagcaatttcttgggaacagccactcacgattttcacgttatagtagaagagcctcctcgctggacaaagaagcctcagagtgctgtgtatagcaccggaagcaatggcatcttgttatgtgaggctgaaggagaacctcaacccacaatcaagtggagagtcaatggctccccagttgacaatcatccatttgctggtgatgttgtcttccccagggaaatcagttttaccaaccttcaaccaaatcatactgctgtgtaccagtgtgaagcctcaaatgtccatggaactatccttgccaatgccaatattgatgttgtggatgtccgtccattgatacaaaccaaagatggagaaaattacgctacagtggttgggtacagtgctttcttacattgcgagttctttgcttcacctgaggcagtcgtgtcctggcagaaggtggaagaagtgaaacccctggagggcaggcggtatcatatctatgaaaatggcacattgcagatcaacagaaccaccgaagaagatgctgggtcttactcatgttgggtagaaaatgctataggaaaaactgcagtcacagccaatttggatattagaaatgctacaaaacttagagtttctcctaagaatcctcgtatccccaaattgcatatgcttgaattacattgtgaaagcaaatgtgactcacatttgaaacacagtttgaagttgtcctggagtaaagatggagaagcctttgaaattaatggcacagaagatggcaggataattattgatggagctaatttgaccatatctaatgtaactttagaggaccaaggtatttactgctgttcagctcatactgctctagacagtgctgccgatataactcaagtaactgttcttgatgttccggatccaccagaaaaccttcacttgtctgaaagacagaacaggagtgttcggctgacctgggaagctggagctgaccacaacagcaatattagcgagtatattgttgaatttgaaggaaacaaagaagagcctggaaggtgggaggaactgaccagagtccaaggaaagaaaaccacagttatcttacctttggctccatttgtgagataccagttcagggtcatagccgtgaacgaagtagggagaagtcagcctagccagccgtcagaccatcatgaaacaccaccagcagctccagataggaatccacaaaacataagggttcaagcctctcaacccaaggaaatgattataaagtgggagcctttgaaatccatggagcagaatggaccaggcctagagtacagagtgacctggaagccacagggagccccagtggagtgggaagaagaaacagtcacaaaccacacattgcgggtgatgacgcctgctgtctatgccccttatgatgtcaaggtccaggctatcaatcaactaggatctgggcctgaccctcagtcagtgactctctattctggagaagactatcctgatacagctccagtgatccatggggtggacgttataaacagtacattagttaaagttacctggtcaacagttccaaaggacagagtacatggacgtctgaaaggctatcagataaattggtggaaaacaaaaagtctgttggatggaagaacacatcccaaagaagtgaacattctaagattttcaggacaaagaaactctggaatggttccttccttagatgcctttagtgaatttcatttaacagtcttagcctataactctaaaggagctggtcctgaaagtgagccttatatatttcaaacaccagaaggagtacctgaacagccaacttttctaaaggtcatcaaagttgataaagacactgccactttatcttggggactacctaagaaattaaatggaaacttaactggctatcttttgcaatatcagataataaatgacacctacgagattggagaattaaatgatattaacattacaactccatcaaagcccagctggcacctctcaaacctgaatgcaactaccaagtacaaattctacttgagggcttgcacttcacagggctgtggaaaaccgatcacggaggaaagctccaccttaggagaagggaaatatgctggtttatatgatgacatctccactcaaggctggtttattggactgatgtgtgcgattgctcttctcacactactattattaactgtttgctttgtgaagaggaatagaggtggaaagtactcagttaaagaaaaggaagatttgcatccagacccagaaattcagtcagtaaaagatgaaacctttggtgaatacagtgacagtgatgaaaagcctctcaaaggaagccttcggtcccttaatagggatatgcagcctactgaaagtgctgacagcttagtcgaatacggagagggagaccatggtctcttcagtgaagatggatcatttattggtgcctacgctggatctaaggagaagggatctgttgaaagcaatggaagttctacagcaacttttccccttcgggcataaacacaacatatgtaagcaacgctactggttcaccccaaccttccatatttatctgttcaaaggagcaagaactttcatataggaatagaaacatgctggccgaagatttcatccagaagtcaacatcctgcaattatgttgaaaagagtagtactttcttcaaaatataaaatgccaagcacttcaggcctatgttttgcttatattgttttcaggtgctcaaaatgcaaaacacaaaacaaatcctgcatttagatacacctcaactaaatccaaagtccccattcagtatattccatatttgcctgattttactattcggtgtgtttgcatagatgttgctacttggtgggtttttctccgtatgcacattggtatacagtctctgagaactggcttggtgactttgcttcactacaggttaaaagaccataagcaaactggttatttaaaatgtaaaaaggaatatgaaagtcttattaaaacacttcattgaaaatatacagtctaaatttattatttaaattttactagcaaaagtcttaggtgaacaatcaactagtatttgttgagctcctatttgcccagagatggtcatatttaaacagaagtatacgtttttcagtttcaacatgaatttttttatttctgtcagttatgacatccacaagcatcactttttgtgtctgttttttttttttttcttggactaaattcaactgcatggaagcggtggtcagaaggttgttttatacgagaacaggcagaaagtgcccattgttcaggattctaatagctacatctacttaatatcttcatttctaaattgactgcttttacctttttctcatgtttatataatggtatgcttgcatatatttcatgaatacattgtacatattatgttaatatttacacaatttaaaatatagatgtgttttattttgaagtgagaaaatgaacattaacaggcatgtttgtacagctagaatatattagtaagatactgtttttcgtcattccagagctacaactaataacacgaggttccaaagctgaagactttgtataaagtatttgggttttgttcttgtattgctttctttcaacagtttcaaaataaaatatcatataaatattgagggaaatgttttcatatttttcaaaataggtttttattgttgaatgtacatctaccccagcccctcaaaagaaaaactgtttacatagaaattcctacacatacgtttgcgtatatgttattttaaacatctttgtggtgagaattttttccccgatattctccttctgtcaaagtcagaacaaattcagggaatttattttctggcagttgtgctccagtccttttaaaattgtacatgaacatgttttagaaacaatatggaggatgatgcatacatgtcggtcaagttcagcgctcgacattttatggaaagatttttttaaccttaccacgaaatacttaactactgtttaagtgaattgacttatttcactttagtttttgaactgtgattattggtatactgttatatcctcaacttggatttatggtaaccccttatagttcatggagaccaaaatttggggtatttataatagtcagcgcaggaatgcacatggaatatctacttgtccttttgaacctcacgagtcatccagaatgtatagacaggaaaagcatgtcttatttaaaactgtaatttatgggctcaggatctgaccgcagtcccgggagtaagcatttcaaagggggaaggcagtgtggtccctaccctgtgtgaatgtgaggatgtagacatccatcagtgcaactcgagctccatcctcctccgatttctaaggttccagttttctggagggacagtcatcatgttttgatttatctgggagaaaactgtggtgcacagcttgtgaggagggcaaggttgtgacgttcgagcttagttctggtgttattctgtctcctcttctttgtcatcagccaaaacgtggtttttaaagagagtcatgcaggttagaaataatgtcaaaaatatttaggaatttaataacctttaagtcagaaactaaaacaaatactgaaatattagctcttcctacacttcgtgttcccctttagctgcctgaaaatcaagattgctcctgctcagatcttctgagtggctaaaacttatggatatgaaaaatgagattgaatgatgactatgctttgctatcattgttacctttcctcaatactatttggcaactactgggactcttcagcacaaaaggaatagatctatgattgaccctgattttaattgtgaaattatatgattcatatattttatgaatcagaataaccttcaaataaaataaatctaagtcggttaaaatggatttcatgattttccctcagaaaatgagtaacagagtccacggcgtgcaatggtaattataaattggtgatgcttgtttgcaaattgcccactcgtgataagtcaacagccaatatttaaaactttgttcgttactggctttaccctaactttctctagtctactgtcaatatcattttaatgtaattgattgtatatagtctcaagaatggttggtgggcatgagttcctagagaactgtccaagggttgggaaaatccaaattctcttcctggttccagcactgattttgtacataaacattaggcaggttgcttaacctttttatttcaaactctctcaactctaaagtgctaataataatctcagttaccttatctttgtcacagggtgttcttttttatgaagaaaaatttgaaaatgataaaagctaagatgccttctaacttcataagcaaacctttaactaattatgtatctgaaagtcacccccacataccaactcaacttttttcctgtgaacacataaatatatttttatagaaaaacaaatctacataaaataaatctactgtttagtgagcagtatgatttgtacatgccattgaaaattattaatcagaagaaaattaagcagggtctttgctatacaaaagtgttttccactaattttgcatgcgtatttataagaaaaatgtgaatttggtggttttattctatcggtataaaggcattgatattttagatgcacccgtgtttgtaaaaatgtagagcacaatggaattatgctggaagtctcaaataatatttttttcctattttatactcatggaagagataagctaaagaggggacaataatgagaaatgttggtgtgcttttctaagcatttaaaacataattgccaattgaaaccctaaatatgtttacataccattaagatatgattcatgtaacaatgttaaattaattataatgggattgggtttgttatctgtggtagtatatatcctagtgttcctatagtgaaataagtagggttcagccaaagctttctttgttttgtaccttaaattgttcgattacgtcatcaaaagagatgaaaggtatgtagaacaggttcacgtgattacctttttcttttggcttggattaatattcatagtagaactttataaaacgtgtttgtattgtaggtggtgtttgtattatgcttatgactatgtatggtttgaaaatattttcattatacatgaaattcaactttccaaataaaagttctacttcatgtaatccaaaaaaaaaaaaa

SEQ ID NO: 120 - DNA, 8031 bp, Homo sapiens
agggatcctacctcttttgaccggagatgttgaaaagcacgaccaaagtttttggcttggtctcttgctttccacaacgagataaagtctgaagcctgtaactctccctgtcccgcgggagcgtgcaaagggagggaagataagcggcgtgggtgaggggtggcggcgcagaacccaggaagggagcagaggcgagagccagcctccggcaggagggcgtagaccccggtgccagccagaacggctccagccttcccgcggccagagagccagcggcgggaggggacgggcgggacctccgcggacagccccgggtgcggaccagcgggcagcggccggcgagaccctccctggatccgcccagagcttaccggaccctgcgcgcccccgtcccggctcccggccggctcgggggagaaggcgcccgaggggaggcgccggacagatcgcgtttcggaggcggcgcaggtgctgtaaactgcaaaccataatcctgtcttaatactgcaaacaaatcatagtggaactaaggggaacttaatttactgtttccaggttaactaaggtctcagctgtaaaccaaaagtgagaggagacattaagattttcattcttaccgggttgtcttcttcctgaagagcaatggagccgcttttacttggaagaggactaatcgtatatctaatgttcctcctgttaaaattctcaaaagcaattgaaataccatcttcagttcaacaggttccaacaatcataaaacagtcaaaagtccaagttgcctttcccttcgatgagtattttcaaattgaatgtgaagctaaaggaaatccagaaccaacattttcgtggactaaggatggcaaccctttttatttcactgaccatcggataattccatcgaacaattcaggaacattcaggatcccaaacgaggggcacatatctcactttcaagggaaataccgctgctttgcttcaaataaactgggaatcgctatgtcagaagaaatagaatttatagttccaagtgttccaaaattcccaaaagaaaaaattgaccctcttgaagtggaggagggagatccaattgtcctcccatgcaatcctcccaaaggcctcccacctttacacatttattggatgaatattgaattagaacacatcgaacaagatgaaagagtatacatgagccaaaagggagatctatacttcgcaaacgtggaagaaaaggacagtcgcaatgactactgttgctttgctgcatttccaagattaaggactattgtacagaaaatgccaatgaaactaacagttaacagtttaaagcatgctaatgactcaagttcatccacagaaattggttccaaggcaaattccatcaagcaaagaaaacccaaactgctgttgcctcccactgagagtggcagtgagtcttcaattaccatcctcaaaggggaaatcttgctgcttgagtgttttgctgaaggcttgccaactccacaggttgattggaacaaaattggtggtgacttaccaaaggggagagaaacaaaagaaaattatggcaagactttgaagatagagaatgtctcctaccaggacaaaggaaattatcgctgcacagccagcaatttcttgggaacagccactcacgattttcacgttatagtagaagagcctcctcgctggacaaagaagcctcagagtgctgtgtatagcaccggaagcaatggcatcttgttatgtgaggctgaaggagaacctcaacccacaatcaagtggagagtcaatggctccccagttgacaatcatccatttgctggtgatgttgtcttccccagggaaatcagttttaccaaccttcaaccaaatcatactgctgtgtaccagtgtgaagcctcaaatgtccatggaactatccttgccaatgccaatattgatgttgtggatgtccgtccattgatacaaaccaaagatggagaaaattacgctacagtggttgggtacagtgctttcttacattgcgagttctttgcttcacctgaggcagtcgtgtcctggcagaaggtggaagaagtgaaacccctggagggcaggcggtatcatatctatgaaaatggcacattgcagatcaacagaaccaccgaagaagatgctgggtcttactcatgttgggtagaaaatgctataggaaaaactgcagtcacagccaatttggatattagaaatgctacaaaacttagagtttctcctaagaatcctcgtatccccaaattgcatatgcttgaattacattgtgaaagcaaatgtgactcacatttgaaacacagtttgaagttgtcctggagtaaagatggagaagcctttgaaattaatggcacagaagatggcaggataattattgatggagctaatttgaccatatctaatgtaactttagaggaccaaggtatttactgctgttcagctcatactgctctagacagtgctgccgatataactcaagtaactgttcttgatgttccggatccaccagaaaaccttcacttgtctgaaagacagaacaggagtgttcggctgacctgggaagctggagctgaccacaacagcaatattagcgagtatattgttgaatttgaaggaaacaaagaagagcctggaaggtgggaggaactgaccagagtccaaggaaagaaaaccacagttatcttacctttggctccatttgtgagataccagttcagggtcatagccgtgaacgaagtagggagaagtcagcctagccagccgtcagaccatcatgaaacaccaccagcagctccagataggaatccacaaaacataagggttcaagcctctcaacccaaggaaatgattataaagtgggagcctttgaaatccatggagcagaatggaccaggcctagagtacagagtgacctggaagccacagggagccccagtggagtgggaagaagaaacagtcacaaaccacacattgcgggtgatgacgcctgctgtctatgccccttatgatgtcaaggtccaggctatcaatcaactaggatctgggcctgaccctcagtcagtgactctctattctggagaagactatcctgatacagctccagtgatccatggggtggacgttataaacagtacattagttaaagttacctggtcaacagttccaaaggacagagtacatggacgtctgaaaggctatcagataaattggtggaaaacaaaaagtctgttggatggaagaacacatcccaaagaagtgaacattctaagattttcaggacaaagaaactctggaatggttccttccttagatgcctttagtgaatttcatttaacagtcttagcctataactctaaaggagctggtcctgaaagtgagccttatatatttcaaacaccagaaggagtacctgaacagccaacttttctaaaggtcatcaaagttgataaagacactgccactttatcttggggactacctaagaaattaaatggaaacttaactggctatcttttgcaatatcagataataaatgacacctacgagattggagaattaaatgatattaacattacaactccatcaaagcccagctggcacctctcaaacctgaatgcaactaccaagtacaaattctacttgagggcttgcacttcacagggctgtggaaaaccgatcacggaggaaagctccaccttaggagaagggagtaaaggtatcgggaagatatcaggagtaaatcttactcaaaagactcacccaatagaggtatttgagccgggagctgaacatatagttcgcctaatgactaagaattggggcgataatgatagcatttttcaagatgtaattgagacaagagggagagaatatgctggtttatatgatgacatctccactcaaggctggtttattggactgatgtgtgcgattgctcttctcacactactattattaactgtttgctttgtgaagaggaatagaggtggaaagtactcagttaaagaaaaggaagatttgcatccagacccagaaattcagtcagtaaaagatgaaacctttggtgaatacagtgacagtgatgaaaagcctctcaaaggaagccttcggtcccttaatagggatatgcagcctactgaaagtgctgacagcttagtcgaatacggagagggagaccatggtctcttcagtgaagatggatcatttattggtgcctacgctggatctaaggagaagggatctgttgaaagcaatggaagttctacagcaacttttccccttcgggcataaacacaacatatgtaagcaacgctactggttcaccccaaccttccatatttatctgttcaaaggagcaagaactttcatataggaatagaaacatgctggccgaagatttcatccagaagtcaacatcctgcaattatgttgaaaagagtagtactttcttcaaaatataaaatgccaagcacttcaggcctatgttttgcttatattgttttcaggtgctcaaaatgcaaaacacaaaacaaatcctgcatttagatacacctcaactaaatccaaagtccccattcagtatattccatatttgcctgattttactattcggtgtgtttgcatagatgttgctacttggtgggtttttctccgtatgcacattggtatacagtctctgagaactggcttggtgactttgcttcactacaggttaaaagaccataagcaaactggttatttaaaatgtaaaaaggaatatgaaagtcttattaaaacacttcattgaaaatatacagtctaaatttattatttaaattttactagcaaaagtcttaggtgaacaatcaactagtatttgttgagctcctatttgcccagagatggtcatatttaaacagaagtatacgtttttcagtttcaacatgaatttttttatttctgtcagttatgacatccacaagcatcactttttgtgtctgttttttttttttttcttggactaaattcaactgcatggaagcggtggtcagaaggttgttttatacgagaacaggcagaaagtgcccattgttcaggattctaatagctacatctacttaatatcttcatttctaaattgactgcttttacctttttctcatgtttatataatggtatgcttgcatatatttcatgaatacattgtacatattatgttaatatttacacaatttaaaatatagatgtgttttattttgaagtgagaaaatgaacattaacaggcatgtttgtacagctagaatatattagtaagatactgtttttcgtcattccagagctacaactaataacacgaggttccaaagctgaagactttgtataaagtatttgggttttgttcttgtattgctttctttcaacagtttcaaaataaaatatcatataaatattgagggaaatgttttcatatttttcaaaataggtttttattgttgaatgtacatctaccccagcccctcaaaagaaaaactgtttacatagaaattcctacacatacgtttgcgtatatgttattttaaacatctttgtggtgagaattttttccccgatattctccttctgtcaaagtcagaacaaattcagggaatttattttctggcagttgtgctccagtccttttaaaattgtacatgaacatgttttagaaacaatatggaggatgatgcatacatgtcggtcaagttcagcgctcgacattttatggaaagatttttttaaccttaccacgaaatacttaactactgtttaagtgaattgacttatttcactttagtttttgaactgtgattattggtatactgttatatcctcaacttggatttatggtaaccccttatagttcatggagaccaaaatttggggtatttataatagtcagcgcaggaatgcacatggaatatctacttgtccttttgaacctcacgagtcatccagaatgtatagacaggaaaagcatgtcttatttaaaactgtaatttatgggctcaggatctgaccgcagtcccgggagtaagcatttcaaagggggaaggcagtgtggtccctaccctgtgtgaatgtgaggatgtagacatccatcagtgcaactcgagctccatcctcctccgatttctaaggttccagttttctggagggacagtcatcatgttttgatttatctgggagaaaactgtggtgcacagcttgtgaggagggcaaggttgtgacgttcgagcttagttctggtgttattctgtctcctcttctttgtcatcagccaaaacgtggtttttaaagagagtcatgcaggttagaaataatgtcaaaaatatttaggaatttaataacctttaagtcagaaactaaaacaaatactgaaatattagctcttcctacacttcgtgttcccctttagctgcctgaaaatcaagattgctcctgctcagatcttctgagtggctaaaacttatggatatgaaaaatgagattgaatgatgactatgctttgctatcattgttacctttcctcaatactatttggcaactactgggactcttcagcacaaaaggaatagatctatgattgaccctgattttaattgtgaaattatatgattcatatattttatgaatcagaataaccttcaaataaaataaatctaagtcggttaaaatggatttcatgattttccctcagaaaatgagtaacagagtccacggcgtgcaatggtaattataaattggtgatgcttgtttgcaaattgcccactcgtgataagtcaacagccaatatttaaaactttgttcgttactggctttaccctaactttctctagtctactgtcaatatcattttaatgtaattgattgtatatagtctcaagaatggttggtgggcatgagttcctagagaactgtccaagggttgggaaaatccaaattctcttcctggttccagcactgattttgtacataaacattaggcaggttgcttaacctttttatttcaaactctctcaactctaaagtgctaataataatctcagttaccttatctttgtcacagggtgttcttttttatgaagaaaaatttgaaaatgataaaagctaagatgccttctaacttcataagcaaacctttaactaattatgtatctgaaagtcacccccacataccaactcaacttttttcctgtgaacacataaatatatttttatagaaaaacaaatctacataaaataaatctactgtttagtgagcagtatgatttgtacatgccattgaaaattattaatcagaagaaaattaagcagggtctttgctatacaaaagtgttttccactaattttgcatgcgtatttataagaaaaatgtgaatttggtggttttattctatcggtataaaggcattgatattttagatgcacccgtgtttgtaaaaatgtagagcacaatggaattatgctggaagtctcaaataatatttttttcctattttatactcatggaagagataagctaaagaggggacaataatgagaaatgttggtgtgcttttctaagcatttaaaacataattgccaattgaaaccctaaatatgtttacataccattaagatatgattcatgtaacaatgttaaattaattataatgggattgggtttgttatctgtggtagtatatatcctagtgttcctatagtgaaataagtagggttcagccaaagctttctttgttttgtaccttaaattgttcgattacgtcatcaaaagagatgaaaggtatgtagaacaggttcacgtgattacctttttcttttggcttggattaatattcatagtagaactttataaaacgtgtttgtattgtaggtggtgtttgtattatgcttatgactatgtatggtttgaaaatattttcattatacatgaaattcaactttccaaataaaagttctacttcatgtaatccaaaaaaaaaaaaa

SEQ ID NO: 121 - DNA, 2585 bp, Homo sapiens
gaaaatgccgccagcctggagcggggaatccatggaccgtggggttgtggggttggggagcacgaaaacccagagaggggctagagctccacctccccagaccgccgaggggcgagagggcgcgccgggggccgtggttgccatggctcctggtagcggagcccggggggctggagatgccggtcgcggatggtcccttcttcctctttgtgcctctctctttctctcgctttttttttttttttggagtgtgagtgtgcgtggggaggcagcacggagaaagtgattaatttggggagcagggattggagccgggaggctggggaaagccagcccctccgttcccactctccgggctcgctgcgagccacagtgtctcagccaggggcagggccggggaactcctgcgaaaaaccacgggccggaggagcagcagccgcgcgggcccaggtgctgtaaactgcaaaccataatcctgtcttaatactgcaaacaaatcatagtggaactaaggggaacttaatttactgaatctcttgtttggaaatttcctcccagaatacccaacctctcaagaattttaaaacgatggagtaaaataatcttcaagctctgattagattacaacatatgaatgctaattttgtttttacaggtttcaacacccaaatttatctgaacttagggcacaataagcagtttaactgttagaaatcttatgagattgagtttgtgcctatcagatgaatacatatttgtatataacatttcaattattgctacatttatgtataatttatccaaaagcgatgttatccatgcatcttaacagaaggcttaagtagttgaatgacagggactacatttttgctgcagaagatcatgataaaacatgtgctgtgtggtcaccttgggtaatgtgccgagactgcttgatggtacttatctctacacactgcatctcatactgatttatggatttggatgacttattttatgtcaaagacataaagagagtagagaagagagaatagtattttcatttcagtcttaaaaaagttctatcctatgagatgttaacagctgccttctcttggtggtctgtgaagtttttataaagatattgattattttccaatgacacacaaatctactgctagagaccattcaaatgcttagttacaccagggcttggctcctgtaccctgaggaggacacgattaaccaaatcctcctttttaaatgttctcaggacaatgagctgcacatacggcacaaatgcaatttgcttgaccaatcttgcctctgtctccttctatctccgtttacatgcttcatgctcagttgaaattaattctctacacattggtctcatgaacacatctttgagagcagagttcaagttaaatttttattttcatcattacctctgagaacacaatctggggcatattagacgctttgtaagtgtagaggtggggagaaagaagaagaaagagaggaacagaaggagggaaagattttcctgatagatcactttctggacactttctgtgctgagaagttctgagattgcctctctggatcctgctatcttggcagtcttgctaagagtttccatttacacttaaacatggttactgatgcgtcttaatgttgccttaactatcaggtttctgatagccccacatagccaagtgggaccctggtcaagaagttcacctctgttaaataaatatgcatagattttcaacatctcttcacatgcattcagaggtgatgaaagattccactggatgctagaacattgtgcataaataatcgaagttgtatgctcttcagcaatgatgctaccccatatcctttttttttctttcccatgatatgaggatatgagtgcagcagaactagctccatgcccttgtcccagaattaatcattcctatccatatttgatgtctttaccttttaaatatttatgggctgttatgttcctttcttgttgttcacccactctggggacattcagaagcctcacatttcttccttagccaaacaccccattcccttcatcctctctcagctgttctttggattacctccaaattgcatacataattttggtattgaggtgccaaaaatgcatttgtttcaactggagttttattgaagttgcttttactcaaatcaagtacacaaataaatttgatttccaaggcatgaaaattcagttaggtctccgaagggaagctgaggtatacttatatttcattataatgctacaggtagattttaagtcactaggaaaatgacatctcaaaatcaaaagattatagaatgagcactatatgaagaattacattttaaagcataggtctgtgatcattttgtaggtttttgttgttactgtcagtctattggtttttattaataattttattgaggtataactgatacacaaacgacatatttaatgtgtacaatttgatgagtttggacatatccgaggactcatgagactgtcactgcaatcaaggtaataaatgtatttattacttccaaaaaaaaaaaaaaaaaaaaaaaaa

SEQ ID NO: 122 - DNA, 7042 bp, Homo sapiens
agttttgtttttttttttttcggcggagatcctcgttggggctgggaaactcctgcaaaactcgagaccaggaagccagcccgcaccccaacccccaccaaagccacctactcttcttctgtgggaggccagtccacatccgctctcacccgagagagatattcagctggatccaaagtgactgatgaagggaaggaaatcatgtcaagcgaagccttgaaaaagctgccctgagacggtgtcccgccgaaagaatgttggctcaattaagaaacatcagggagataaattcaacccagtgtgtctaaaaatgactacaaaacgaagtttgtttgtgcggttggtaccatgtcgctgtctacgaggggaagaggagactgtcactactcttgattattctcattgcagcttagaacaagttccgaaagagatttttacttttgaaaaaaccttggaggaactctatttagatgctaatcagattgaagagcttccaaagcaactttttaactgtcagtctttacacaaactgagtttgccagacaatgatttaacaacgttaccagcatccattgcaaaccttattaatctcagggaactggatgtcagcaagaatggaatacaggagtttccagaaaatataaaaaattgtaaagttttgacaattgtggaggccagtgtaaaccctatttccaagctccctgatggattttctcagctgttaaacctaacccagttgtatctgaatgatgcttttcttgagttcttgccagcaaattttggcagattaactaaactccaaatattagagcttagagaaaaccagttaaaaatgttgcctaaaactatgaatagactgacccagctggaaagactggatttgggaagtaacgaattcacggaagtgcctgaagtacttgagcaactaagtggattgaaagagttttggatggatgctaatagactgacttttattccagggtttattggtagtttgaaacagctcacatatttggatgtttctaaaaataatattgaaatggttgaagaaggaatttcaacatgtgaaaaccttcaagacctcctattatcaagcaattcacttcagcagcttcctgagactattggttcgttgaagaatataacaacgcttaaaatagatgaaaaccagttaatgtatctgccagactctataggagggttaatatcagtagaagaactggattgtagtttcaatgaagttgaagctttgccttcatctattgggcagcttactaacttaagaacttttgctgctgatcataattacttacagcagttgcccccagagattggaagctggaaaaatataactgtgctgtttctccattccaataaacttgagacacttccagaggaaatgggtgatatgcaaaaattaaaagtcattaatttaagtgataatagattaaagaatttaccctttagctttacaaagctacagcaattgacagctatgtggctctcagataatcagtccaaacccctgatacctcttcaaaaagaaactgattcagagacccagaaaatggtgcttaccaactacatgttccctcaacagccaaggactgaggatgttatgtttatatcagataatgaaagttttaacccttcattgtgggaggaacagaggaaacagcgggctcaagttgcatttgaatgtgatgaagacaaagatgaaagggaggcacctcccagggagggaaatttaaaaagatatccaacaccatacccagatgagcttaagaatatggtcaaaactgttcaaaccattgtacatagattaaaagatgaagagaccaatgaagactcaggaagagatttgaaaccacatgaagatcaacaagatataaataaagatgtgggtgtgaagacctcagaaagtactactacagtaaaaagcaaagttgatgaaagagaaaaatatatgataggaaactctgtacagaagatcagtgaacctgaagctgagattagtcctgggagtttaccagtgactgcaaatatgaaagcctctgagaacttgaagcatattgttaaccatgatgatgtttttgaggaatctgaagaactttcttctgatgaagagatgaaaatggcggagatgcgaccaccattaattgaaacctctattaaccagccaaaagtcgtagcacttagtaataacaaaaaagatgatacaaaggaaacagattctttatcagatgaagttacacacaatagcaatcagaataacagcaattgttcttctccatctcggatgtctgattcagtttctcttaatactgatagtagtcaagacacctcactctgctctccagtgaaacaaactcatattgatattaattccaaaatcaggcaagaagatgaaaattttaacagccttttacaaaatggagatattttaaacagttcaacagaggaaaagttcaaagctcatgataaaaaagattttaacttacctgaatatgatttgaatgttgaagagcgattagttctaattgagaaaagtgttgactcaacagccacagctgatgacactcacaaattagatcatatcaatatgaatcttaataaacttataactaatgatacatttcaaccagagatcatggaaagatcaaaaacacaggatattgtgcttggaacaagctttttaagcattaattctaaagaggaaactgagcacttggaaaatggaaacaagtatcctaatttggaatccgtaaataaggtaaatggacattctgaggaaacttcccagtctcctaataggactgaaccacatgacagtgattgttctgttgacttaggtatttccaaaagcactgaagatctctcccctcagaaaagtggtccagttggatctgttgtgaaatctcatagcataactaatatggagattggagggctaaaaatctatgatattcttagtgataatggacctcagcagccaagtacaaccgttaaaatcacatctgctgttgatggaaaaaatatagtcaggagcaagtctgccacactgttgtatgatcaaccattgcaggtatttactggttcttcctcatcttctgatttaatatcaggaacaaaggcaattttcaagtttgattcaaatcataatcccgaagagccaaatataataagaggccccacaagtggcccacaatctgcacctcaaatatatggtcctccacagtataatatccaatacagtagcagtgctgcagtcaaagacactttgtggcactccaaacaaaatccccaaatagaccatgccagttttcctcctcagctccttcctagatcagagagcacagaaaatcaaagttatgctaaacattctgccaatatgaatttctctaatcataacaatgttcgagctaatactgcataccatttacatcagagacttggcccagcaagacatggggaaatgtgggccatctcaccaaacgaccgacttattcctgcagtaactcgaagtacaatccagcgacaaagtagtgtgtcctccacagcctctgtaaatcttggtgatccaggctctacaaggcgggctcagattcctgaaggagattatttatcatacagagagttccactcagcgggaagaactcctccaatgatgccaggatcacagagacccctttctgcacgaacatacagcatagatggtccaaatgcatcaagacctcagagtgctcgaccctctattaatgaaataccagagagaactatgtcagttagtgatttcaattattcacggactagtccttcaaaaagaccaaatgcaagggttggttctgagcattctttattagatcctccaggaaaaagtaaagttcctcgtgactggagagaacaagtacttcgacatattgaagccaaaaagttagaaaagaagcatccccagacatccagttcaggagatccttgtcaagatggtatattcatttcaggacagcagaactactcatcagccacacttagtcacaaagatgttcctccagacagcttgatgaaaatgcctttgagtaatggacagatgggccagcctctcaggcctcaggcaaattatagtcaaatacatcacccccctcaggcatctgtggcaaggcatccctctagagaacaactaattgattacttgatgctgaaagtggcccaccagcctccatatacacagccccattgttctcctagacaaggccatgaactggcaaaacaagagattcgagtgagggttgaaaaggatccagaacttggatttagcatatcaggtggtgtcgggggtagaggaaacccattcagacctgatgatgatggtatatttgtaacaagggtacaacctgaaggaccagcatcaaaattactgcagccaggtgataaaattattcaggctaatggctacagttttataaatattgaacatggacaagcagtgtccttgctaaaaactttccagaatacagttgaactcatcattgtacgagaagtttcctcataagcactgtggacaaaaaaagcggggaagacagcaagatttattggaagatacttacaggggaaattaatattttgactatttttatatataaagaagaactcaaaaaattatgttcaaatttgtacattaatgaaataatggaacttgtggttagagggaaagaaccactgtacagaatataaaggagactgttgaattcataccatataaaacttgttaggtttttaaacatagcaatcaaggctacaaaaacaaacctgtgttgtttttgtatagattgtaggtttatttttggatttcatatacatgactgaactgtgtgcaaggcaatagttagccttgattttagcccagagacagatggcagagctatctctctcatagcttttatgcccttatttttattcaactggtattaatgtttttctcctgaaactactttttttgatgtgggcaagagatttgaagtgttggcttttgctatgtgcatattgaattgaagagtgagtaggtgaaggtggtgctggtgggttcactttccaaggccagactaaaacagttattttctataaaaatctggaagcaaagaatggggatggggagagctacgtggtagtatgtttttattaggagaataatgcaataaaatatgtaatgtcttttttataaagcaaaaaagacaataattgcatttatgagctcggcaggatctgttcttgtcatagccattgactatacatttgctactggtgattcagtttttaattttttagtcacaggaaatttttaactctactgtagatgcatgtccatgcattttctgtgttatggaaatccactgatttttttttttttttcaaatggtggtacttgcaatctgttttataattagtgctccatttaaatctaatttataatttttattttaagcagcaaatgaaacaaaaatggccagttttaagattgtgttgcctgtaacacaaaatgttacgaaggtttaggaaagcctctttgatttttgtttggccttgcattgccttggtaaagtaaaaggaaacagtacacttggagctaggaaaccaaagcaagctttgtgaaactggcacagtgatagagaattgctgtggagagttatagagcaaagggatgggtccttgaggcctgccagtgtgtaaaggtgttcaaataaagggctgtttctacaggtaacattaaatgtgaactcaacacttccagagtctttaaagggtttctatgtgtatcagtgtaatagtgttttaccaccaactgcctttctttgttcctagttactgtaacaaatatttgatgatagaggtttattaattttgtttatccagaccattaattttatttgtttttgttctatgtaatcaaataaaatttgagtaacatgtaatggtaaggattaatgcatggttatttggaccagaaaaaagtgccatagaagaccaataactgtttagttgaggctagtctggaacctttcattagagcaatatttggttattgcacttcatttttatttactaagaaatgcaatttgggaatttttaatctgttatgctttgtttatcaaccttgattttaattaagacttttataagactagcttaaaacaccaaccaacattatttttgcaaaagtgagttggactcactttccattcttgctagtcagagtaagtaggcagcacttttaaaaatatgtgaactcaaatattgcacttctttcaagatgttatcaattggttattgtactgtatagttttaataattttgattgaaaccctttaacaactctttgtaaattttaactcattttagttgattttcagtactatttacataggaattgatttttatggatatagtagaagaaatgtgctgtattttgataaaattcacttattgtatgtgtgttgtaatctaaaaaaaaaaagaatgacaaacagcttctttaagacaagtctcggtgttccctttattcttagtttgtttttaaatattaattttggcattctaaaatagctaacatttcttttattgatttcagattttcacaggcacattctacttttaatcagaaatatatttaataagtataattgtgaagttttcaactactttaccttgaaccacatataccaattataattttggaaaaggaattaagcctcacggaacaatggatcttcagcaaaccttaacttcattgtctgcacattacattgaagtattataaatgcaacagatgttatatgcactggcattttatcctactctagttagttaaaattttatagtattcttgcaacacataaagttgcgtaagaaactttaccaagaggagtattatagccaagttttctttgaaagtattggaaaactaaaattaaatgacaaggactttgaattagaattttgctgtaataaagtttcaaaatttgaataaaataattaaattttttgagga

SEQ ID NO: 123 - DNA, 6844 bp, Homo sapiens
agttttgtttttttttttttcggcggagatcctcgttggggctgggaaactcctgcaaaactcgagaccaggaagccagcccgcaccccaacccccaccaaagccacctactcttcttctgtgggaggccagtccacatccgctctcacccgagagagatattcagctggatccaaagtgactgatgaagggaaggaaatcatgtcaagcgaagccttgaaaaagctgccctgagacggtgtcccgccgaaagaatgttggctcaattaagaaacatcagggagataaattcaacccagtgtgtctaaaaatgactacaaaacgaagtttgtttgtgcggttggtaccatgtcgctgtctacgaggggaagaggagactgtcactactcttgattattctcattgcagcttagaacaagttccgaaagagatttttacttttgaaaaaaccttggaggaactctatttagatgctaatcagattgaagagcttccaaagcaactttttaactgtcagtctttacacaaactgagtttgccagacaatgatttaacaacgttaccagcatccattgcaaaccttattaatctcagggaactggatgtcagcaagaatggaatacaggagtttccagaaaatataaaaaattgtaaagttttgacaattgtggaggccagtgtaaaccctatttccaagctccctgatggattttctcagctgttaaacctaacccagttgtatctgaatgatgcttttcttgagttcttgccagcaaattttggcagattaactaaactccaaatattagagcttagagaaaaccagttaaaaatgttgcctaaaactatgaatagactgacccagctggaaagactggatttgggaagtaacgaattcacggaagtgcctgaagtacttgagcaactaagtggattgaaagagttttggatggatgctaatagactgacttttattccagggtttattggtagtttgaaacagctcacatatttggatgtttctaaaaataatattgaaatggttgaagaaggaatttcaacatgtgaaaaccttcaagacctcctattatcaagcaattcacttcagcagcttcctgagactattggttcgttgaagaatataacaacgcttaaaatagatgaaaaccagttaatgtatctgccagactctataggagggttaatatcagtagaagaactggattgtagtttcaatgaagttgaagctttgccttcatctattgggcagcttactaacttaagaacttttgctgctgatcataattacttacagcagttgcccccagagattggaagctggaaaaatataactgtgctgtttctccattccaataaacttgagacacttccagaggaaatgggtgatatgcaaaaattaaaagtcattaatttaagtgataatagattaaagaatttaccctttagctttacaaagctacagcaattgacagctatgtggctctcagataatcagtccaaacccctgatacctcttcaaaaagaaactgattcagagacccagaaaatggtgcttaccaactacatgttccctcaacagccaaggactgaggatgttatgtttatatcagataatgaaagttttaacccttcattgtgggaggaacagaggaaacagcgggctcaagttgcatttgaatgtgatgaagacaaagatgaaagggaggcacctcccagggagggaaatttaaaaagatatccaacaccatacccagatgagcttaagaatatggtcaaaactgttcaaaccattgtacatagattaaaagatgaagagaccaatgaagactcaggaagagatttgaaaccacatgaagatcaacaagatataaataaagatgtgggtgtgaagacctcagaaagtactactacagtaaaaagcaaagttgatgaaagagaaaaatatatgataggaaactctgtacagaagatcagtgaacctgaagctgagattagtcctgggagtttaccagtgactgcaaatatgaaagcctctgagaacttgaagcatattgttaaccatgatgatgtttttgaggaatctgaagaactttcttctgatgaagagatgaaaatggcggagatgcgaccaccattaattgaaacctctattaaccagccaaaagtcgtagcacttagtaataacaaaaaagatgatacaaaggaaacagattctttatcagatgaagttacacacaatagcaatcagaataacagcaattgttcttctccatctcggatgtctgattcagtttctcttaatactgatagtagtcaagacacctcactctgctctccagtgaaacaaactcatattgatattaattccaaaatcaggcaagaagatgaaaattttaacagccttttacaaaatggagatattttaaacagttcaacagaggaaaagttcaaagctcatgataaaaaagattttaacttacctgaatatgatttgaatgttgaagagcgattagttctaattgagaaaagtgttgactcaacagccacagctgatgacactcacaaattagatcatatcaatatgaatcttaataaacttataactaatgatacatttcaaccagagatcatggaaagatcaaaaacacaggatattgtgcttggaacaagctttttaagcattaattctaaagaggaaactgagcacttggaaaatggaaacaagtatcctaatttggaatccgtaaataaggtaaatggacattctgaggaaacttcccagtctcctaataggactgaaccacatgacagtgattgttctgttgacttaggtatttccaaaagcactgaagatctctcccctcagaaaagtggtccagttggatctgttgtgaaatctcatagcataactaatatggagattggagggctaaaaatctatgatattcttagtgataatggacctcagcagccaagtacaaccgttaaaatcacatctgctgttgatggaaaaaatatagtcaggagcaagtctgccacactgttgtatgatcaaccattgcaggtatttactggttcttcctcatcttctgatttaatatcaggaacaaaggcaattttcaagtttgattcaaatcataatcccgaagagccaaatataataagaggccccacaagtggcccacaatctgcacctcaaatatatggtcctccacagtataatatccaatacagtagcagtgctgcagtcaaagacactttgtggcactccaaacaaaatccccaaatagaccatgccagttttcctcctcagctccttcctagatcagagagcacagaaaatcaaagttatgctaaacattctgccaatatgaatttctctaatcataacaatgttcgagctaatactgcataccatttacatcagagacttggcccagcaagacatggggaaatgtgggccatctcaccaaacgaccgacttattcctgcagtaactcgaagtacaatccagcgacaaagtagtgtgtcctccacagcctctgtaaatcttggtgatccaggctctacaaggcgggctcagattcctgaaggagattatttatcatacagagagttccactcagcgggaagaactcctccaatgatgccaggatcacagagacccctttctgcacgaacatacagcatagatggtccaaatgcatcaagacctcagagtgctcgaccctctattaatgaaataccagagagaactatgtcagttagtgatttcaattattcacggactagtccttcaaaaagaccaaatgcaagggttggttctgagcattctttattagatcctccaggaaaaagtaaagttcctcgtgactggagagaacaagtacttcgacatattgaagccaaaaagttagaaaagatgcctttgagtaatggacagatgggccagcctctcaggcctcaggcaaattatagtcaaatacatcacccccctcaggcatctgtggcaaggcatccctctagagaacaactaattgattacttgatgctgaaagtggcccaccagcctccatatacacagccccattgttctcctagacaaggccatgaactggcaaaacaagagattcgagtgagggttgaaaaggatccagaacttggatttagcatatcaggtggtgtcgggggtagaggaaacccattcagacctgatgatgatgctaatggctacagttttataaatattgaacatggacaagcagtgtccttgctaaaaactttccagaatacagttgaactcatcattgtacgagaagtttcctcataagcactgtggacaaaaaaagcggggaagacagcaagatttattggaagatacttacaggggaaattaatattttgactatttttatatataaagaagaactcaaaaaattatgttcaaatttgtacattaatgaaataatggaacttgtggttagagggaaagaaccactgtacagaatataaaggagactgttgaattcataccatataaaacttgttaggtttttaaacatagcaatcaaggctacaaaaacaaacctgtgttgtttttgtatagattgtaggtttatttttggatttcatatacatgactgaactgtgtgcaaggcaatagttagccttgattttagcccagagacagatggcagagctatctctctcatagcttttatgcccttatttttattcaactggtattaatgtttttctcctgaaactactttttttgatgtgggcaagagatttgaagtgttggcttttgctatgtgcatattgaattgaagagtgagtaggtgaaggtggtgctggtgggttcactttccaaggccagactaaaacagttattttctataaaaatctggaagcaaagaatggggatggggagagctacgtggtagtatgtttttattaggagaataatgcaataaaatatgtaatgtcttttttataaagcaaaaaagacaataattgcatttatgagctcggcaggatctgttcttgtcatagccattgactatacatttgctactggtgattcagtttttaattttttagtcacaggaaatttttaactctactgtagatgcatgtccatgcattttctgtgttatggaaatccactgatttttttttttttttcaaatggtggtacttgcaatctgttttataattagtgctccatttaaatctaatttataatttttattttaagcagcaaatgaaacaaaaatggccagttttaagattgtgttgcctgtaacacaaaatgttacgaaggtttaggaaagcctctttgatttttgtttggccttgcattgccttggtaaagtaaaaggaaacagtacacttggagctaggaaaccaaagcaagctttgtgaaactggcacagtgatagagaattgctgtggagagttatagagcaaagggatgggtccttgaggcctgccagtgtgtaaaggtgttcaaataaagggctgtttctacaggtaacattaaatgtgaactcaacacttccagagtctttaaagggtttctatgtgtatcagtgtaatagtgttttaccaccaactgcctttctttgttcctagttactgtaacaaatatttgatgatagaggtttattaattttgtttatccagaccattaattttatttgtttttgttctatgtaatcaaataaaatttgagtaacatgtaatggtaaggattaatgcatggttatttggaccagaaaaaagtgccatagaagaccaataactgtttagttgaggctagtctggaacctttcattagagcaatatttggttattgcacttcatttttatttactaagaaatgcaatttgggaatttttaatctgttatgctttgtttatcaaccttgattttaattaagacttttataagactagcttaaaacaccaaccaacattatttttgcaaaagtgagttggactcactttccattcttgctagtcagagtaagtaggcagcacttttaaaaatatgtgaactcaaatattgcacttctttcaagatgttatcaattggttattgtactgtatagttttaataattttgattgaaaccctttaacaactctttgtaaattttaactcattttagttgattttcagtactatttacataggaattgatttttatggatatagtagaagaaatgtgctgtattttgataaaattcacttattgtatgtgtgttgtaatctaaaaaaaaaaagaatgacaaacagcttctttaagacaagtctcggtgttccctttattcttagtttgtttttaaatattaattttggcattctaaaatagctaacatttcttttattgatttcagattttcacaggcacattctacttttaatcagaaatatatttaataagtataattgtgaagttttcaactactttaccttgaaccacatataccaattataattttggaaaaggaattaagcctcacggaacaatggatcttcagcaaaccttaacttcattgtctgcacattacattgaagtattataaatgcaacagatgttatatgcactggcattttatcctactctagttagttaaaattttatagtattcttgcaacacataaagttgcgtaagaaactttaccaagaggagtattatagccaagttttctttgaaagtattggaaaactaaaattaaatgacaaggactttgaattagaattttgctgtaataaagtttcaaaatttgaataaaataattaaattttttgagga

SEQ ID NO: 124 - DNA, 7063 bp, Homo sapiens
agttttgtttttttttttttcggcggagatcctcgttggggctgggaaactcctgcaaaactcgagaccaggaagccagcccgcaccccaacccccaccaaagccacctactcttcttctgtgggaggccagtccacatccgctctcacccgagagagatattcagctggatccaaagtgactgatgaagggaaggaaatcatgtcaagcgaagccttgaaaaagctgccctgagacggtgtcccgccgaaagaatgttggctcaattaagaaacatcagggagataaattcaacccagtgtgtctaaaaatgactacaaaacgaagtttgtttgtgcggttggtaccatgtcgctgtctacgaggggaagaggagactgtcactactcttgattattctcattgcagcttagaacaagttccgaaagagatttttacttttgaaaaaaccttggaggaactctatttagatgctaatcagattgaagagcttccaaagcaactttttaactgtcagtctttacacaaactgagtttgccagacaatgatttaacaacgttaccagcatccattgcaaaccttattaatctcagggaactggatgtcagcaagaatggaatacaggagtttccagaaaatataaaaaattgtaaagttttgacaattgtggaggccagtgtaaaccctatttccaagctccctgatggattttctcagctgttaaacctaacccagttgtatctgaatgatgcttttcttgagttcttgccagcaaattttggcagattaactaaactccaaatattagagcttagagaaaaccagttaaaaatgttgcctaaaactatgaatagactgacccagctggaaagactggatttgggaagtaacgaattcacggaagtgcctgaagtacttgagcaactaagtggattgaaagagttttggatggatgctaatagactgacttttattccagggtttattggtagtttgaaacagctcacatatttggatgtttctaaaaataatattgaaatggttgaagaaggaatttcaacatgtgaaaaccttcaagacctcctattatcaagcaattcacttcagcagcttcctgagactattggttcgttgaagaatataacaacgcttaaaatagatgaaaaccagttaatgtatctgccagactctataggagggttaatatcagtagaagaactggattgtagtttcaatgaagttgaagctttgccttcatctattgggcagcttactaacttaagaacttttgctgctgatcataattacttacagcagttgcccccagagattggaagctggaaaaatataactgtgctgtttctccattccaataaacttgagacacttccagaggaaatgggtgatatgcaaaaattaaaagtcattaatttaagtgataatagattaaagaatttaccctttagctttacaaagctacagcaattgacagctatgtggctctcagataatcagtccaaacccctgatacctcttcaaaaagaaactgattcagagacccagaaaatggtgcttaccaactacatgttccctcaacagccaaggactgaggatgttatgtttatatcagataatgaaagttttaacccttcattgtgggaggaacagaggaaacagcgggctcaagttgcatttgaatgtgatgaagacaaagatgaaagggaggcacctcccagggagggaaatttaaaaagatatccaacaccatacccagatgagcttaagaatatggtcaaaactgttcaaaccattgtacatagattaaaagatgaagagaccaatgaagactcaggaagagatttgaaaccacatgaagatcaacaagatataaataaagatgtgggtgtgaagacctcagaaagtactactacagtaaaaagcaaagttgatgaaagagaaaaatatatgataggaaactctgtacagaagatcagtgaacctgaagctgagattagtcctgggagtttaccagtgactgcaaatatgaaagcctctgagaacttgaagcatattgttaaccatgatgatgtttttgaggaatctgaagaactttcttctgatgaagagatgaaaatggcggagatgcgaccaccattaattgaaacctctattaaccagccaaaagtcgtagcacttagtaataacaaaaaagatgatacaaaggaaacagattctttatcagatgaagttacacacaatagcaatcagaataacagcaattgttcttctccatctcggatgtctgattcagtttctcttaatactgatagtagtcaagacacctcactctgctctccagtgaaacaaactcatattgatattaattccaaaatcaggcaagaagatgaaaattttaacagccttttacaaaatggagatattttaaacagttcaacagaggaaaagttcaaagctcatgataaaaaagattttaacttacctgaatatgatttgaatgttgaagagcgattagttctaattgagaaaagtgttgactcaacagccacagctgatgacactcacaaattagatcatatcaatatgaatcttaataaacttataactaatgatacatttcaaccagagatcatggaaagatcaaaaacacaggatattgtgcttggaacaagctttttaagcattaattctaaagaggaaactgagcacttggaaaatggaaacaagtatcctaatttggaatccgtaaataaggtaaatggacattctgaggaaacttcccagtctcctaataggactgaaccacatgacagtgattgttctgttgacttaggtatttccaaaagcactgaagatctctcccctcagaaaagtggtccagttggatctgttgtgaaatctcatagcataactaatatggagattggagggctaaaaatctatgatattcttagtgataatggacctcagcagccaagtacaaccgttaaaatcacatctgctgttgatggaaaaaatatagtcaggagcaagtctgccacactgttgtatgatcaaccattgcaggtatttactggttcttcctcatcttctgatttaatatcaggaacaaaggcaattttcaagtttgattcaaatcataatcccgaagagccaaatataataagaggccccacaagtggcccacaatctgcacctcaaatatatggtcctccacagtataatatccaatacagtagcagtgctgcagtcaaagacactttgtggcactccaaacaaaatccccaaatagaccatgccagttttcctcctcagctccttcctagatcagagagcacagaaaatcaaagttatgctaaacattctgccaatatgaatttctctaatcataacaatgttcgagctaatactgcataccatttacatcagagacttggcccagcaagacatggggaaatgtgggccatctcaccaaacgaccgacttattcctgcagtaactcgaagtacaatccagcgacaaagtagtgtgtcctccacagcctctgtaaatcttggtgatccaggctctacaaggcgggctcagattcctgaaggagattatttatcatacagagagttccactcagcgggaagaactcctccaatgatgccaggatcacagagacccctttctgcacgaacatacagcatagatggtccaaatgcatcaagacctcagagtgctcgaccctctattaatgaaataccagagagaactatgtcagttagtgatttcaattattcacggactagtccttcaaaaagaccaaatgcaagggttggttctgagcattctttattagatcctccaggaaaaagtaaagttcctcgtgactggagagaacaagtacttcgacatattgaagccaaaaagttagaaaagagcatgctgtcaaggtcctttaattccaattttactactgtaagcagttttcactgtggcagctctagggatctgcatggcagccagggcagtcttgccttgagtgttgcagacagaagaggttctggtgggcacatttttcgaatgcctttgagtaatggacagatgggccagcctctcaggcctcaggcaaattatagtcaaatacatcacccccctcaggcatctgtggcaaggcatccctctagagaacaactaattgattacttgatgctgaaagtggcccaccagcctccatatacacagccccattgttctcctagacaaggccatgaactggcaaaacaagagattcgagtgagggttgaaaaggatccagaacttggatttagcatatcaggtggtgtcgggggtagaggaaacccattcagacctgatgatgatggtatatttgtaacaagggtacaacctgaaggaccagcatcaaaattactgcagccaggtgataaaattattcaggctaatggctacagttttataaatattgaacatggacaagcagtgtccttgctaaaaactttccagaatacagttgaactcatcattgtacgagaagtttcctcataagcactgtggacaaaaaaagcggggaagacagcaagatttattggaagatacttacaggggaaattaatattttgactatttttatatataaagaagaactcaaaaaattatgttcaaatttgtacattaatgaaataatggaacttgtggttagagggaaagaaccactgtacagaatataaaggagactgttgaattcataccatataaaacttgttaggtttttaaacatagcaatcaaggctacaaaaacaaacctgtgttgtttttgtatagattgtaggtttatttttggatttcatatacatgactgaactgtgtgcaaggcaatagttagccttgattttagcccagagacagatggcagagctatctctctcatagcttttatgcccttatttttattcaactggtattaatgtttttctcctgaaactactttttttgatgtgggcaagagatttgaagtgttggcttttgctatgtgcatattgaattgaagagtgagtaggtgaaggtggtgctggtgggttcactttccaaggccagactaaaacagttattttctataaaaatctggaagcaaagaatggggatggggagagctacgtggtagtatgtttttattaggagaataatgcaataaaatatgtaatgtcttttttataaagcaaaaaagacaataattgcatttatgagctcggcaggatctgttcttgtcatagccattgactatacatttgctactggtgattcagtttttaattttttagtcacaggaaatttttaactctactgtagatgcatgtccatgcattttctgtgttatggaaatccactgatttttttttttttttcaaatggtggtacttgcaatctgttttataattagtgctccatttaaatctaatttataatttttattttaagcagcaaatgaaacaaaaatggccagttttaagattgtgttgcctgtaacacaaaatgttacgaaggtttaggaaagcctctttgatttttgtttggccttgcattgccttggtaaagtaaaaggaaacagtacacttggagctaggaaaccaaagcaagctttgtgaaactggcacagtgatagagaattgctgtggagagttatagagcaaagggatgggtccttgaggcctgccagtgtgtaaaggtgttcaaataaagggctgtttctacaggtaacattaaatgtgaactcaacacttccagagtctttaaagggtttctatgtgtatcagtgtaatagtgttttaccaccaactgcctttctttgttcctagttactgtaacaaatatttgatgatagaggtttattaattttgtttatccagaccattaattttatttgtttttgttctatgtaatcaaataaaatttgagtaacatgtaatggtaaggattaatgcatggttatttggaccagaaaaaagtgccatagaagaccaataactgtttagttgaggctagtctggaacctttcattagagcaatatttggttattgcacttcatttttatttactaagaaatgcaatttgggaatttttaatctgttatgctttgtttatcaaccttgattttaattaagacttttataagactagcttaaaacaccaaccaacattatttttgcaaaagtgagttggactcactttccattcttgctagtcagagtaagtaggcagcacttttaaaaatatgtgaactcaaatattgcacttctttcaagatgttatcaattggttattgtactgtatagttttaataattttgattgaaaccctttaacaactctttgtaaattttaactcattttagttgattttcagtactatttacataggaattgatttttatggatatagtagaagaaatgtgctgtattttgataaaattcacttattgtatgtgtgttgtaatctaaaaaaaaaaagaatgacaaacagcttctttaagacaagtctcggtgttccctttattcttagtttgtttttaaatattaattttggcattctaaaatagctaacatttcttttattgatttcagattttcacaggcacattctacttttaatcagaaatatatttaataagtataattgtgaagttttcaactactttaccttgaaccacatataccaattataattttggaaaaggaattaagcctcacggaacaatggatcttcagcaaaccttaacttcattgtctgcacattacattgaagtattataaatgcaacagatgttatatgcactggcattttatcctactctagttagttaaaattttatagtattcttgcaacacataaagttgcgtaagaaactttaccaagaggagtattatagccaagttttctttgaaagtattggaaaactaaaattaaatgacaaggactttgaattagaattttgctgtaataaagtttcaaaatttgaataaaataattaaattttttgagga

SEQ ID NO: 125 - DNA, 6907 bp, Homo sapiens
agttttgtttttttttttttcggcggagatcctcgttggggctgggaaactcctgcaaaactcgagaccaggaagccagcccgcaccccaacccccaccaaagccacctactcttcttctgtgggaggccagtccacatccgctctcacccgagagagatattcagctggatccaaagtgactgatgaagggaaggaaatcatgtcaagcgaagccttgaaaaagctgccctgagacggtgtcccgccgaaagaatgttggctcaattaagaaacatcagggagataaattcaacccagtgtgtctaaaaatgactacaaaacgaagtttgtttgtgcggttggtaccatgtcgctgtctacgaggggaagaggagactgtcactactcttgattattctcattgcagcttagaacaagttccgaaagagatttttacttttgaaaaaaccttggaggaactctatttagatgctaatcagattgaagagcttccaaagcaactttttaactgtcagtctttacacaaactgagtttgccagacaatgatttaacaacgttaccagcatccattgcaaaccttattaatctcagggaactggatgtcagcaagaatggaatacaggagtttccagaaaatataaaaaattgtaaagttttgacaattgtggaggccagtgtaaaccctatttccaagctccctgatggattttctcagctgttaaacctaacccagttgtatctgaatgatgcttttcttgagttcttgccagcaaattttggcagattaactaaactccaaatattagagcttagagaaaaccagttaaaaatgttgcctaaaactatgaatagactgacccagctggaaagactggatttgggaagtaacgaattcacggaagtgcctgaagtacttgagcaactaagtggattgaaagagttttggatggatgctaatagactgacttttattccagggtttattggtagtttgaaacagctcacatatttggatgtttctaaaaataatattgaaatggttgaagaaggaatttcaacatgtgaaaaccttcaagacctcctattatcaagcaattcacttcagcagcttcctgagactattggttcgttgaagaatataacaacgcttaaaatagatgaaaaccagttaatgtatctgccagactctataggagggttaatatcagtagaagaactggattgtagtttcaatgaagttgaagctttgccttcatctattgggcagcttactaacttaagaacttttgctgctgatcataattacttacagcagttgcccccagagattggaagctggaaaaatataactgtgctgtttctccattccaataaacttgagacacttccagaggaaatgggtgatatgcaaaaattaaaagtcattaatttaagtgataatagattaaagaatttaccctttagctttacaaagctacagcaattgacagctatgtggctctcagataatcagtccaaacccctgatacctcttcaaaaagaaactgattcagagacccagaaaatggtgcttaccaactacatgttccctcaacagccaaggactgaggatgttatgtttatatcagataatgaaagttttaacccttcattgtgggaggaacagaggaaacagcgggctcaagttgcatttgaatgtgatgaagacaaagatgaaagggaggcacctcccagggagggaaatttaaaaagatatccaacaccatacccagatgagcttaagaatatggtcaaaactgttcaaaccattgtacatagattaaaagatgaagagaccaatgaagactcaggaagagatttgaaaccacatgaagatcaacaagatataaataaagatacctcagaaagtactactacagtaaaaagcaaagttgatgaaagagaaaaatatatgataggaaactctgtacagaagatcagtgaacctgaagctgagattagtcctgggagtttaccagtgactgcaaatatgaaagcctctgagaacttgaagcatattgttaaccatgatgatgtttttgaggaatctgaagaactttcttctgatgaagagatgaaaatggcggagatgcgaccaccattaattgaaacctctattaaccagccaaaagtcgtagcacttagtaataacaaaaaagatgatacaaaggaaacagattctttatcagatgaagttacacacaatagcaatcagaataacagcaattgttcttctccatctcggatgtctgattcagtttctcttaatactgatagtagtcaagacacctcactctgctctccagtgaaacaaactcatattgatattaattccaaaatcaggcaagaagatgaaaattttaacagccttttacaaaatggagatattttaaacagttcaacagaggaaaagttcaaagctcatgataaaaaagattttaacttacctgaatatgatttgaatgttgaagagcgattagttctaattgagaaaagtgttgactcaacagccacagctgatgacactcacaaattagatcatatcaatatgaatcttaataaacttataactaatgatacatttcaaccagagatcatggaaagatcaaaaacacaggatattgtgcttggaacaagctttttaagcattaattctaaagaggaaactgagcacttggaaaatggaaacaagtatcctaatttggaatccgtaaataaggtaaatggacattctgaggaaacttcccagtctcctaataggactgaaccacatgacagtgattgttctgttgacttaggtatttccaaaagcactgaagatctctcccctcagaaaagtggtccagttggatctgttgtgaaatctcatagcataactaatatggagattggagggctaaaaatctatgatattcttagtgataatggacctcagcagccaagtacaaccgttaaaatcacatctgctgttgatggaaaaaatatagtcaggagcaagtctgccacactgttgtatgatcaaccattgcaggtatttactggttcttcctcatcttctgatttaatatcaggaacaaaggcaattttcaagtttgattcaaatcataatcccgaagagccaaatataataagaggccccacaagtggcccacaatctgcacctcaaatatatggtcctccacagtataatatccaatacagtagcagtgctgcagtcaaagacactttgtggcactccaaacaaaatccccaaatagaccatgccagttttcctcctcagctccttcctagatcagagagcacagaaaatcaaagttatgctaaacattctgccaatatgaatttctctaatcataacaatgttcgagctaatactgcataccatttacatcagagacttggcccagcaagacatggggaaatgtgggccatctcaccaaacgaccgacttattcctgcagtaactcgaagtacaatccagcgacaaagtagtgtgtcctccacagcctctgtaaatcttggtgatccaggctctacaaggcgggctcagattcctgaaggagattatttatcatacagagagttccactcagcgggaagaactcctccaatgatgccaggatcacagagacccctttctgcacgaacatacagcatagatggtccaaatgcatcaagacctcagagtgctcgaccctctattaatgaaataccagagagaactatgtcagttagtgatttcaattattcacggactagtccttcaaaaagaccaaatgcaagggttggttctgagcattctttattagatcctccaggaaaaagtaaagttcctcgtgactggagagaacaagtacttcgacatattgaagccaaaaagttagaaaagatgcctttgagtaatggacagatgggccagcctctcaggcctcaggcaaattatagtcaaatacatcacccccctcaggcatctgtggcaaggcatccctctagagaacaactaattgattacttgatgctgaaagtggcccaccagcctccatatacacagccccattgttctcctagacaaggccatgaactggcaaaacaagagattcgagtgagggttgaaaaggatccagaacttggatttagcatatcaggtggtgtcgggggtagaggaaacccattcagacctgatgatgatggtatatttgtaacaagggtacaacctgaaggaccagcatcaaaattactgcagccaggtgataaaattattcaggctaatggctacagttttataaatattgaacatggacaagcagtgtccttgctaaaaactttccagaatacagttgaactcatcattgtacgagaagtttcctcataagcactgtggacaaaaaaagcggggaagacagcaagatttattggaagatacttacaggggaaattaatattttgactatttttatatataaagaagaactcaaaaaattatgttcaaatttgtacattaatgaaataatggaacttgtggttagagggaaagaaccactgtacagaatataaaggagactgttgaattcataccatataaaacttgttaggtttttaaacatagcaatcaaggctacaaaaacaaacctgtgttgtttttgtatagattgtaggtttatttttggatttcatatacatgactgaactgtgtgcaaggcaatagttagccttgattttagcccagagacagatggcagagctatctctctcatagcttttatgcccttatttttattcaactggtattaatgtttttctcctgaaactactttttttgatgtgggcaagagatttgaagtgttggcttttgctatgtgcatattgaattgaagagtgagtaggtgaaggtggtgctggtgggttcactttccaaggccagactaaaacagttattttctataaaaatctggaagcaaagaatggggatggggagagctacgtggtagtatgtttttattaggagaataatgcaataaaatatgtaatgtcttttttataaagcaaaaaagacaataattgcatttatgagctcggcaggatctgttcttgtcatagccattgactatacatttgctactggtgattcagtttttaattttttagtcacaggaaatttttaactctactgtagatgcatgtccatgcattttctgtgttatggaaatccactgatttttttttttttttcaaatggtggtacttgcaatctgttttataattagtgctccatttaaatctaatttataatttttattttaagcagcaaatgaaacaaaaatggccagttttaagattgtgttgcctgtaacacaaaatgttacgaaggtttaggaaagcctctttgatttttgtttggccttgcattgccttggtaaagtaaaaggaaacagtacacttggagctaggaaaccaaagcaagctttgtgaaactggcacagtgatagagaattgctgtggagagttatagagcaaagggatgggtccttgaggcctgccagtgtgtaaaggtgttcaaataaagggctgtttctacaggtaacattaaatgtgaactcaacacttccagagtctttaaagggtttctatgtgtatcagtgtaatagtgttttaccaccaactgcctttctttgttcctagttactgtaacaaatatttgatgatagaggtttattaattttgtttatccagaccattaattttatttgtttttgttctatgtaatcaaataaaatttgagtaacatgtaatggtaaggattaatgcatggttatttggaccagaaaaaagtgccatagaagaccaataactgtttagttgaggctagtctggaacctttcattagagcaatatttggttattgcacttcatttttatttactaagaaatgcaatttgggaatttttaatctgttatgctttgtttatcaaccttgattttaattaagacttttataagactagcttaaaacaccaaccaacattatttttgcaaaagtgagttggactcactttccattcttgctagtcagagtaagtaggcagcacttttaaaaatatgtgaactcaaatattgcacttctttcaagatgttatcaattggttattgtactgtatagttttaataattttgattgaaaccctttaacaactctttgtaaattttaactcattttagttgattttcagtactatttacataggaattgatttttatggatatagtagaagaaatgtgctgtattttgataaaattcacttattgtatgtgtgttgtaatctaaaaaaaaaaagaatgacaaacagcttctttaagacaagtctcggtgttccctttattcttagtttgtttttaaatattaattttggcattctaaaatagctaacatttcttttattgatttcagattttcacaggcacattctacttttaatcagaaatatatttaataagtataattgtgaagttttcaactactttaccttgaaccacatataccaattataattttggaaaaggaattaagcctcacggaacaatggatcttcagcaaaccttaacttcattgtctgcacattacattgaagtattataaatgcaacagatgttatatgcactggcattttatcctactctagttagttaaaattttatagtattcttgcaacacataaagttgcgtaagaaactttaccaagaggagtattatagccaagttttctttgaaagtattggaaaactaaaattaaatgacaaggactttgaattagaattttgctgtaataaagtttcaaaatttgaataaaataattaaattttttgagga

SEQ ID NO: 126 - DNA, 6919 bp, Homo sapiens
agttttgtttttttttttttcggcggagatcctcgttggggctgggaaactcctgcaaaactcgagaccaggaagccagcccgcaccccaacccccaccaaagccacctactcttcttctgtgggaggccagtccacatccgctctcacccgagagagatattcagctggatccaaagtgactgatgaagggaaggaaatcatgtcaagcgaagccttgaaaaagctgccctgagacggtgtcccgccgaaagaatgttggctcaattaagaaacatcagggagataaattcaacccagtgtgtctaaaaatgactacaaaacgaagtttgtttgtgcggttggtaccatgtcgctgtctacgaggggaagaggagactgtcactactcttgattattctcattgcagcttagaacaagttccgaaagagatttttacttttgaaaaaaccttggaggaactctatttagatgctaatcagattgaagagcttccaaagcaactttttaactgtcagtctttacacaaactgagtttgccagacaatgatttaacaacgttaccagcatccattgcaaaccttattaatctcagggaactggatgtcagcaagaatggaatacaggagtttccagaaaatataaaaaattgtaaagttttgacaattgtggaggccagtgtaaaccctatttccaagctccctgatggattttctcagctgttaaacctaacccagttgtatctgaatgatgcttttcttgagttcttgccagcaaattttggcagattaactaaactccaaatattagagcttagagaaaaccagttaaaaatgttgcctaaaactatgaatagactgacccagctggaaagactggatttgggaagtaacgaattcacggaagtgcctgaagtacttgagcaactaagtggattgaaagagttttggatggatgctaatagactgacttttattccagggtttattggtagtttgaaacagctcacatatttggatgtttctaaaaataatattgaaatggttgaagaaggaatttcaacatgtgaaaaccttcaagacctcctattatcaagcaattcacttcagcagcttcctgagactattggttcgttgaagaatataacaacgcttaaaatagatgaaaaccagttaatgtatctgccagactctataggagggttaatatcagtagaagaactggattgtagtttcaatgaagttgaagctttgccttcatctattgggcagcttactaacttaagaacttttgctgctgatcataattacttacagcagttgcccccagagattggaagctggaaaaatataactgtgctgtttctccattccaataaacttgagacacttccagaggaaatgggtgatatgcaaaaattaaaagtcattaatttaagtgataatagattaaagaatttaccctttagctttacaaagctacagcaattgacagctatgtggctctcagataatcagtccaaacccctgatacctcttcaaaaagaaactgattcagagacccagaaaatggtgcttaccaactacatgttccctcaacagccaaggactgaggatgttatgtttatatcagataatgaaagttttaacccttcattgtgggaggaacagaggaaacagcgggctcaagttgcatttgaatgtgatgaagacaaagatgaaagggaggcacctcccagggagggaaatttaaaaagatatccaacaccatacccagatgagcttaagaatatggtcaaaactgttcaaaccattgtacatagattaaaagatgaagagaccaatgaagactcaggaagagatttgaaaccacatgaagatcaacaagatataaataaagatgtgggtgtgaagacctcagaaagtactactacagtaaaaagcaaagttgatgaaagagaaaaatatatgataggaaactctgtacagaagatcagtgaacctgaagctgagattagtcctgggagtttaccagtgactgcaaatatgaaagcctctgagaacttgaagcatattgttaaccatgatgatgtttttgaggaatctgaagaactttcttctgatgaagagatgaaaatggcggagatgcgaccaccattaattgaaacctctattaaccagccaaaagtcgtagcacttagtaataacaaaaaagatgatacaaaggaaacagattctttatcagatgaagttacacacaatagcaatcagaataacagcaattgttcttctccatctcggatgtctgattcagtttctcttaatactgatagtagtcaagacacctcactctgctctccagtgaaacaaactcatattgatattaattccaaaatcaggcaagaagatgaaaattttaacagccttttacaaaatggagatattttaaacagttcaacagaggaaaagttcaaagctcatgataaaaaagattttaacttacctgaatatgatttgaatgttgaagagcgattagttctaattgagaaaagtgttgactcaacagccacagctgatgacactcacaaattagatcatatcaatatgaatcttaataaacttataactaatgatacatttcaaccagagatcatggaaagatcaaaaacacaggatattgtgcttggaacaagctttttaagcattaattctaaagaggaaactgagcacttggaaaatggaaacaagtatcctaatttggaatccgtaaataaggtaaatggacattctgaggaaacttcccagtctcctaataggactgaaccacatgacagtgattgttctgttgacttaggtatttccaaaagcactgaagatctctcccctcagaaaagtggtccagttggatctgttgtgaaatctcatagcataactaatatggagattggagggctaaaaatctatgatattcttagtgataatggacctcagcagccaagtacaaccgttaaaatcacatctgctgttgatggaaaaaatatagtcaggagcaagtctgccacactgttgtatgatcaaccattgcaggtatttactggttcttcctcatcttctgatttaatatcaggaacaaaggcaattttcaagtttgattcaaatcataatcccgaagagccaaatataataagaggccccacaagtggcccacaatctgcacctcaaatatatggtcctccacagtataatatccaatacagtagcagtgctgcagtcaaagacactttgtggcactccaaacaaaatccccaaatagaccatgccagttttcctcctcagctccttcctagatcagagagcacagaaaatcaaagttatgctaaacattctgccaatatgaatttctctaatcataacaatgttcgagctaatactgcataccatttacatcagagacttggcccagcaagacatggggaaatgtgggccatctcaccaaacgaccgacttattcctgcagtaactcgaagtacaatccagcgacaaagtagtgtgtcctccacagcctctgtaaatcttggtgatccaggctctacaaggcgggctcagattcctgaaggagattatttatcatacagagagttccactcagcgggaagaactcctccaatgatgccaggatcacagagacccctttctgcacgaacatacagcatagatggtccaaatgcatcaagacctcagagtgctcgaccctctattaatgaaataccagagagaactatgtcagttagtgatttcaattattcacggactagtccttcaaaaagaccaaatgcaagggttggttctgagcattctttattagatcctccaggaaaaagtaaagttcctcgtgactggagagaacaagtacttcgacatattgaagccaaaaagttagaaaagatgcctttgagtaatggacagatgggccagcctctcaggcctcaggcaaattatagtcaaatacatcacccccctcaggcatctgtggcaaggcatccctctagagaacaactaattgattacttgatgctgaaagtggcccaccagcctccatatacacagccccattgttctcctagacaaggccatgaactggcaaaacaagagattcgagtgagggttgaaaaggatccagaacttggatttagcatatcaggtggtgtcgggggtagaggaaacccattcagacctgatgatgatggtatatttgtaacaagggtacaacctgaaggaccagcatcaaaattactgcagccaggtgataaaattattcaggctaatggctacagttttataaatattgaacatggacaagcagtgtccttgctaaaaactttccagaatacagttgaactcatcattgtacgagaagtttcctcataagcactgtggacaaaaaaagcggggaagacagcaagatttattggaagatacttacaggggaaattaatattttgactatttttatatataaagaagaactcaaaaaattatgttcaaatttgtacattaatgaaataatggaacttgtggttagagggaaagaaccactgtacagaatataaaggagactgttgaattcataccatataaaacttgttaggtttttaaacatagcaatcaaggctacaaaaacaaacctgtgttgtttttgtatagattgtaggtttatttttggatttcatatacatgactgaactgtgtgcaaggcaatagttagccttgattttagcccagagacagatggcagagctatctctctcatagcttttatgcccttatttttattcaactggtattaatgtttttctcctgaaactactttttttgatgtgggcaagagatttgaagtgttggcttttgctatgtgcatattgaattgaagagtgagtaggtgaaggtggtgctggtgggttcactttccaaggccagactaaaacagttattttctataaaaatctggaagcaaagaatggggatggggagagctacgtggtagtatgtttttattaggagaataatgcaataaaatatgtaatgtcttttttataaagcaaaaaagacaataattgcatttatgagctcggcaggatctgttcttgtcatagccattgactatacatttgctactggtgattcagtttttaattttttagtcacaggaaatttttaactctactgtagatgcatgtccatgcattttctgtgttatggaaatccactgatttttttttttttttcaaatggtggtacttgcaatctgttttataattagtgctccatttaaatctaatttataatttttattttaagcagcaaatgaaacaaaaatggccagttttaagattgtgttgcctgtaacacaaaatgttacgaaggtttaggaaagcctctttgatttttgtttggccttgcattgccttggtaaagtaaaaggaaacagtacacttggagctaggaaaccaaagcaagctttgtgaaactggcacagtgatagagaattgctgtggagagttatagagcaaagggatgggtccttgaggcctgccagtgtgtaaaggtgttcaaataaagggctgtttctacaggtaacattaaatgtgaactcaacacttccagagtctttaaagggtttctatgtgtatcagtgtaatagtgttttaccaccaactgcctttctttgttcctagttactgtaacaaatatttgatgatagaggtttattaattttgtttatccagaccattaattttatttgtttttgttctatgtaatcaaataaaatttgagtaacatgtaatggtaaggattaatgcatggttatttggaccagaaaaaagtgccatagaagaccaataactgtttagttgaggctagtctggaacctttcattagagcaatatttggttattgcacttcatttttatttactaagaaatgcaatttgggaatttttaatctgttatgctttgtttatcaaccttgattttaattaagacttttataagactagcttaaaacaccaaccaacattatttttgcaaaagtgagttggactcactttccattcttgctagtcagagtaagtaggcagcacttttaaaaatatgtgaactcaaatattgcacttctttcaagatgttatcaattggttattgtactgtatagttttaataattttgattgaaaccctttaacaactctttgtaaattttaactcattttagttgattttcagtactatttacataggaattgatttttatggatatagtagaagaaatgtgctgtattttgataaaattcacttattgtatgtgtgttgtaatctaaaaaaaaaaagaatgacaaacagcttctttaagacaagtctcggtgttccctttattcttagtttgtttttaaatattaattttggcattctaaaatagctaacatttcttttattgatttcagattttcacaggcacattctacttttaatcagaaatatatttaataagtataattgtgaagttttcaactactttaccttgaaccacatataccaattataattttggaaaaggaattaagcctcacggaacaatggatcttcagcaaaccttaacttcattgtctgcacattacattgaagtattataaatgcaacagatgttatatgcactggcattttatcctactctagttagttaaaattttatagtattcttgcaacacataaagttgcgtaagaaactttaccaagaggagtattatagccaagttttctttgaaagtattggaaaactaaaattaaatgacaaggactttgaattagaattttgctgtaataaagtttcaaaatttgaataaaataattaaattttttgagga

SEQ ID NO: 127 - DNA, 2402 bp, Homo sapiens
gcccgcgccggctgtgctgcacagggggaggagagggaaccccaggcgcgagcgggaagaggggacctgcagccacaacttctctggtcctctgcatcccttctgtccctccacccgtccccttccccaccctctggcccccaccttcttggaggcgacaacccccgggaggcattagaagggatttttcccgcaggttgcgaagggaagcaaacttggtggcaacttgcctcccggtgcgggcgtctctcccccaccgtctcaacatgcttaggggtccggggcccgggctgctgctgctggccgtccagtgcctggggacagcggtgccctccacgggagcctcgaagagcaagaggcaggctcagcaaatggttcagccccagtccccggtggctgtcagtcaaagcaagcccggttgttatgacaatggaaaacactatcagataaatcaacagtgggagcggacctacctaggcaatgcgttggtttgtacttgttatggaggaagccgaggttttaactgcgagagtaaacctgaagctgaagagacttgctttgacaagtacactgggaacacttaccgagtgggtgacacttatgagcgtcctaaagactccatgatctgggactgtacctgcatcggggctgggcgagggagaataagctgtaccatcgcaaaccgctgccatgaagggggtcagtcctacaagattggtgacacctggaggagaccacatgagactggtggttacatgttagagtgtgtgtgtcttggtaatggaaaaggagaatggacctgcaagcccatagctgagaagtgttttgatcatgctgctgggacttcctatgtggtcggagaaacgtgggagaagccctaccaaggctggatgatggtagattgtacttgcctgggagaaggcagcggacgcatcacttgcacttctagaaatagatgcaacgatcaggacacaaggacatcctatagaattggagacacctggagcaagaaggataatcgaggaaacctgctccagtgcatctgcacaggcaacggccgaggagagtggaagtgtgagaggcacacctctgtgcagaccacatcgagcggatctggccccttcaccgatgttcgtgcagctgtttaccaaccgcagcctcacccccagcctcctccctatggccactgtgtcacagacagtggtgtggtctactctgtggggatgcagtggctgaagacacaaggaaataagcaaatgctttgcacgtgcctgggcaacggagtcagctgccaagagacagctgtaacccagacttacggtggcaactcaaatggagagccatgtgtcttaccattcacctacaatggcaggacgttctactcctgcaccacagaagggcgacaggacggacatctttggtgcagcacaacttcgaattatgagcaggaccagaaatactctttctgcacagaccacactgttttggttcagactcgaggaggaaattccaatggtgccttgtgccacttccccttcctatacaacaaccacaattacactgattgcacttctgagggcagaagagacaacatgaagtggtgtgggaccacacagaactatgatgccgaccagaagtttgggttctgccccatggctgcccacgaggaaatctgcacaaccaatgaaggggtcatgtaccgcattggagatcagtgggataagcagcatgacatgggtcacatgatgaggtgcacgtgtgttgggaatggtcgtggggaatggacatgcattgcctactcgcagcttcgagatcagtgcattgttgatgacatcacttacaatgtgaacgacacattccacaagcgtcatgaagaggggcacatgctgaactgtacatgcttcggtcagggtcggggcaggtggaagtgtgatcccgtcgaccaatgccaggattcagagactgggacgttttatcaaattggagattcatgggagaagtatgtgcatggtgtcagataccagtgctactgctatggccgtggcattggggagtggcattgccaacctttacagacctatccaagctcaagtggtcctgtcgaagtatttatcactgagactccgagtcagcccaactcccaccccatccagtggaatgcaccacagccatctcacatttccaagtacattctcaggtggagacctgtgagtatcccacccagaaaccttggatactgagtctcctaatcttatcaattctgatggtttctttttttcccagcttttgagccaacaactctgattaactattcctatagcatttactatatttgtttagtgaacaaacaatatgtggtcaattaaattgacttgtagactgaaaaaaaaaaaaaaaaaaaa

SEQ ID NO: 128 - DNA, 7912 bp, Homo sapiens
gcccgcgccggctgtgctgcacagggggaggagagggaaccccaggcgcgagcgggaagaggggacctgcagccacaacttctctggtcctctgcatcccttctgtccctccacccgtccccttccccaccctctggcccccaccttcttggaggcgacaacccccgggaggcattagaagggatttttcccgcaggttgcgaagggaagcaaacttggtggcaacttgcctcccggtgcgggcgtctctcccccaccgtctcaacatgcttaggggtccggggcccgggctgctgctgctggccgtccagtgcctggggacagcggtgccctccacgggagcctcgaagagcaagaggcaggctcagcaaatggttcagccccagtccccggtggctgtcagtcaaagcaagcccggttgttatgacaatggaaaacactatcagataaatcaacagtgggagcggacctacctaggcaatgcgttggtttgtacttgttatggaggaagccgaggttttaactgcgagagtaaacctgaagctgaagagacttgctttgacaagtacactgggaacacttaccgagtgggtgacacttatgagcgtcctaaagactccatgatctgggactgtacctgcatcggggctgggcgagggagaataagctgtaccatcgcaaaccgctgccatgaagggggtcagtcctacaagattggtgacacctggaggagaccacatgagactggtggttacatgttagagtgtgtgtgtcttggtaatggaaaaggagaatggacctgcaagcccatagctgagaagtgttttgatcatgctgctgggacttcctatgtggtcggagaaacgtgggagaagccctaccaaggctggatgatggtagattgtacttgcctgggagaaggcagcggacgcatcacttgcacttctagaaatagatgcaacgatcaggacacaaggacatcctatagaattggagacacctggagcaagaaggataatcgaggaaacctgctccagtgcatctgcacaggcaacggccgaggagagtggaagtgtgagaggcacacctctgtgcagaccacatcgagcggatctggccccttcaccgatgttcgtgcagctgtttaccaaccgcagcctcacccccagcctcctccctatggccactgtgtcacagacagtggtgtggtctactctgtggggatgcagtggctgaagacacaaggaaataagcaaatgctttgcacgtgcctgggcaacggagtcagctgccaagagacagctgtaacccagacttacggtggcaactcaaatggagagccatgtgtcttaccattcacctacaatggcaggacgttctactcctgcaccacagaagggcgacaggacggacatctttggtgcagcacaacttcgaattatgagcaggaccagaaatactctttctgcacagaccacactgttttggttcagactcgaggaggaaattccaatggtgccttgtgccacttccccttcctatacaacaaccacaattacactgattgcacttctgagggcagaagagacaacatgaagtggtgtgggaccacacagaactatgatgccgaccagaagtttgggttctgccccatggctgcccacgaggaaatctgcacaaccaatgaaggggtcatgtaccgcattggagatcagtgggataagcagcatgacatgggtcacatgatgaggtgcacgtgtgttgggaatggtcgtggggaatggacatgcattgcctactcgcagcttcgagatcagtgcattgttgatgacatcacttacaatgtgaacgacacattccacaagcgtcatgaagaggggcacatgctgaactgtacatgcttcggtcagggtcggggcaggtggaagtgtgatcccgtcgaccaatgccaggattcagagactgggacgttttatcaaattggagattcatgggagaagtatgtgcatggtgtcagataccagtgctactgctatggccgtggcattggggagtggcattgccaacctttacagacctatccaagctcaagtggtcctgtcgaagtatttatcactgagactccgagtcagcccaactcccaccccatccagtggaatgcaccacagccatctcacatttccaagtacattctcaggtggagacctaaaaattctgtaggccgttggaaggaagctaccataccaggccacttaaactcctacaccatcaaaggcctgaagcctggtgtggtatacgagggccagctcatcagcatccagcagtacggccaccaagaagtgactcgctttgacttcaccaccaccagcaccagcacacctgtgaccagcaacaccgtgacaggagagacgactcccttttctcctcttgtggccacttctgaatctgtgaccgaaatcacagccagtagctttgtggtctcctgggtctcagcttccgacaccgtgtcgggattccgggtggaatatgagctgagtgaggagggagatgagccacagtacctggatcttccaagcacagccacttctgtgaacatccctgacctgcttcctggccgaaaatacattgtaaatgtctatcagatatctgaggatggggagcagagtttgatcctgtctacttcacaaacaacagcgcctgatgcccctcctgacccgactgtggaccaagttgatgacacctcaattgttgttcgctggagcagaccccaggctcccatcacagggtacagaatagtctattcgccatcagtagaaggtagcagcacagaactcaaccttcctgaaactgcaaactccgtcaccctcagtgacttgcaacctggtgttcagtataacatcactatctatgctgtggaagaaaatcaagaaagtacacctgttgtcattcaacaagaaaccactggcaccccacgctcagatacagtgccctctcccagggacctgcagtttgtggaagtgacagacgtgaaggtcaccatcatgtggacaccgcctgagagtgcagtgaccggctaccgtgtggatgtgatccccgtcaacctgcctggcgagcacgggcagaggctgcccatcagcaggaacacctttgcagaagtcaccgggctgtcccctggggtcacctattacttcaaagtctttgcagtgagccatgggagggagagcaagcctctgactgctcaacagacaaccaaactggatgctcccactaacctccagtttgtcaatgaaactgattctactgtcctggtgagatggactccacctcgggcccagataacaggataccgactgaccgtgggccttacccgaagaggacagcccaggcagtacaatgtgggtccctctgtctccaagtacccactgaggaatctgcagcctgcatctgagtacaccgtatccctcgtggccataaagggcaaccaagagagccccaaagccactggagtctttaccacactgcagcctgggagctctattccaccttacaacaccgaggtgactgagaccaccattgtgatcacatggacgcctgctccaagaattggttttaagctgggtgtacgaccaagccagggaggagaggcaccacgagaagtgacttcagactcaggaagcatcgttgtgtccggcttgactccaggagtagaatacgtctacaccatccaagtcctgagagatggacaggaaagagatgcgccaattgtaaacaaagtggtgacaccattgtctccaccaacaaacttgcatctggaggcaaaccctgacactggagtgctcacagtctcctgggagaggagcaccaccccagacattactggttatagaattaccacaacccctacaaacggccagcagggaaattctttggaagaagtggtccatgctgatcagagctcctgcacttttgataacctgagtcccggcctggagtacaatgtcagtgtttacactgtcaaggatgacaaggaaagtgtccctatctctgataccatcatcccagctgttcctcctcccactgacctgcgattcaccaacattggtccagacaccatgcgtgtcacctgggctccacccccatccattgatttaaccaacttcctggtgcgttactcacctgtgaaaaatgaggaagatgttgcagagttgtcaatttctccttcagacaatgcagtggtcttaacaaatctcctgcctggtacagaatatgtagtgagtgtctccagtgtctacgaacaacatgagagcacacctcttagaggaagacagaaaacaggtcttgattccccaactggcattgacttttctgatattactgccaactcttttactgtgcactggattgctcctcgagccaccatcactggctacaggatccgccatcatcccgagcacttcagtgggagacctcgagaagatcgggtgccccactctcggaattccatcaccctcaccaacctcactccaggcacagagtatgtggtcagcatcgttgctcttaatggcagagaggaaagtcccttattgattggccaacaatcaacagtttctgatgttccgagggacctggaagttgttgctgcgacccccaccagcctactgatcagctgggatgctcctgctgtcacagtgagatattacaggatcacttacggagagacaggaggaaatagccctgtccaggagttcactgtgcctgggagcaagtctacagctaccatcagcggccttaaacctggagttgattataccatcactgtgtatgctgtcactggccgtggagacagccccgcaagcagcaagccaatttccattaattaccgaacagaaattgacaaaccatcccagatgcaagtgaccgatgttcaggacaacagcattagtgtcaagtggctgccttcaagttcccctgttactggttacagagtaaccaccactcccaaaaatggaccaggaccaacaaaaactaaaactgcaggtccagatcaaacagaaatgactattgaaggcttgcagcccacagtggagtatgtggttagtgtctatgctcagaatccaagcggagagagtcagcctctggttcagactgcagtaaccactattcctgcaccaactgacctgaagttcactcaggtcacacccacaagcctgagcgcccagtggacaccacccaatgttcagctcactggatatcgagtgcgggtgacccccaaggagaagaccggaccaatgaaagaaatcaaccttgctcctgacagctcatccgtggttgtatcaggacttatggtggccaccaaatatgaagtgagtgtctatgctcttaaggacactttgacaagcagaccagctcagggagttgtcaccactctggagaatgtcagcccaccaagaagggctcgtgtgacagatgctactgagaccaccatcaccattagctggagaaccaagactgagacgatcactggcttccaagttgatgccgttccagccaatggccagactccaatccagagaaccatcaagccagatgtcagaagctacaccatcacaggtttacaaccaggcactgactacaagatctacctgtacaccttgaatgacaatgctcggagctcccctgtggtcatcgacgcctccactgccattgatgcaccatccaacctgcgtttcctggccaccacacccaattccttgctggtatcatggcagccgccacgtgccaggattaccggctacatcatcaagtatgagaagcctgggtctcctcccagagaagtggtccctcggccccgccctggtgtcacagaggctactattactggcctggaaccgggaaccgaatatacaatttatgtcattgccctgaagaataatcagaagagcgagcccctgattggaaggaaaaagacaggacaagaagctctctctcagacaaccatctcatgggccccattccaggacacttctgagtacatcatttcatgtcatcctgttggcactgatgaagaacccttacagttcagggttcctggaacttctaccagtgccactctgacaggcctcaccagaggtgccacctacaacatcatagtggaggcactgaaagaccagcagaggcataaggttcgggaagaggttgttaccgtgggcaactctgtcaacgaaggcttgaaccaacctacggatgactcgtgctttgacccctacacagtttcccattatgccgttggagatgagtgggaacgaatgtctgaatcaggctttaaactgttgtgccagtgcttaggctttggaagtggtcatttcagatgtgattcatctagatggtgccatgacaatggtgtgaactacaagattggagagaagtgggaccgtcagggagaaaatggccagatgatgagctgcacatgtcttgggaacggaaaaggagaattcaagtgtgaccctcatgaggcaacgtgttatgatgatgggaagacataccacgtaggagaacagtggcagaaggaatatctcggtgccatttgctcctgcacatgctttggaggccagcggggctggcgctgtgacaactgccgcagacctgggggtgaacccagtcccgaaggcactactggccagtcctacaaccagtattctcagagataccatcagagaacaaacactaatgttaattgcccaattgagtgcttcatgcctttagatgtacaggctgacagagaagattcccgagagtaaatcatctttccaatccagaggaacaagcatgtctctctgccaagatccatctaaactggagtgatgttagcagacccagcttagagttcttctttctttcttaagccctttgctctggaggaagttctccagcttcagctcaactcacagcttctccaagcatcaccctgggagtttcctgagggttttctcataaatgagggctgcacattgcctgttctgcttcgaagtattcaataccgctcagtattttaaatgaagtgattctaagatttggtttgggatcaataggaaagcatatgcagccaaccaagatgcaaatgttttgaaatgatatgaccaaaattttaagtaggaaagtcacccaaacacttctgctttcacttaagtgtctggcccgcaatactgtaggaacaagcatgatcttgttactgtgatattttaaatatccacagtactcactttttccaaatgatcctagtaattgcctagaaatatctttctcttacctgttatttatcaatttttcccagtatttttatacggaaaaaattgtattgaaaacacttagtatgcagttgataagaggaatttggtataattatggtgggtgattattttttatactgtatgtgccaaagctttactactgtggaaagacaactgttttaataaaagatttacattccacaacttgaagttcatctatttgatataagacaccttcgggggaaataattcctgtgaatattctttttcaattcagcaaacatttgaaaatctatgatgtgcaagtctaattgttgatttcagtacaagattttctaaatcagttgctacaaaaactgattggtttttgtcacttcatctcttcactaatggagatagctttacactttctgctttaatagatttaagtggaccccaatatttattaaaattgctagtttaccgttcagaagtataatagaaataatctttagttgctcttttctaaccattgtaattcttcccttcttccctccacctttccttcattgaataaacctctgttcaaagagattgcctgcaagggaaataaaaatgactaagatattaaaaaaaaaaaaaaaaaa

SEQ ID NO: 129 - DNA, 8272 bp, Homo sapiens
gcccgcgccggctgtgctgcacagggggaggagagggaaccccaggcgcgagcgggaagaggggacctgcagccacaacttctctggtcctctgcatcccttctgtccctccacccgtccccttccccaccctctggcccccaccttcttggaggcgacaacccccgggaggcattagaagggatttttcccgcaggttgcgaagggaagcaaacttggtggcaacttgcctcccggtgcgggcgtctctcccccaccgtctcaacatgcttaggggtccggggcccgggctgctgctgctggccgtccagtgcctggggacagcggtgccctccacgggagcctcgaagagcaagaggcaggctcagcaaatggttcagccccagtccccggtggctgtcagtcaaagcaagcccggttgttatgacaatggaaaacactatcagataaatcaacagtgggagcggacctacctaggcaatgcgttggtttgtacttgttatggaggaagccgaggttttaactgcgagagtaaacctgaagctgaagagacttgctttgacaagtacactgggaacacttaccgagtgggtgacacttatgagcgtcctaaagactccatgatctgggactgtacctgcatcggggctgggcgagggagaataagctgtaccatcgcaaaccgctgccatgaagggggtcagtcctacaagattggtgacacctggaggagaccacatgagactggtggttacatgttagagtgtgtgtgtcttggtaatggaaaaggagaatggacctgcaagcccatagctgagaagtgttttgatcatgctgctgggacttcctatgtggtcggagaaacgtgggagaagccctaccaaggctggatgatggtagattgtacttgcctgggagaaggcagcggacgcatcacttgcacttctagaaatagatgcaacgatcaggacacaaggacatcctatagaattggagacacctggagcaagaaggataatcgaggaaacctgctccagtgcatctgcacaggcaacggccgaggagagtggaagtgtgagaggcacacctctgtgcagaccacatcgagcggatctggccccttcaccgatgttcgtgcagctgtttaccaaccgcagcctcacccccagcctcctccctatggccactgtgtcacagacagtggtgtggtctactctgtggggatgcagtggctgaagacacaaggaaataagcaaatgctttgcacgtgcctgggcaacggagtcagctgccaagagacagctgtaacccagacttacggtggcaactcaaatggagagccatgtgtcttaccattcacctacaatggcaggacgttctactcctgcaccacagaagggcgacaggacggacatctttggtgcagcacaacttcgaattatgagcaggaccagaaatactctttctgcacagaccacactgttttggttcagactcgaggaggaaattccaatggtgccttgtgccacttccccttcctatacaacaaccacaattacactgattgcacttctgagggcagaagagacaacatgaagtggtgtgggaccacacagaactatgatgccgaccagaagtttgggttctgccccatggctgcccacgaggaaatctgcacaaccaatgaaggggtcatgtaccgcattggagatcagtgggataagcagcatgacatgggtcacatgatgaggtgcacgtgtgttgggaatggtcgtggggaatggacatgcattgcctactcgcagcttcgagatcagtgcattgttgatgacatcacttacaatgtgaacgacacattccacaagcgtcatgaagaggggcacatgctgaactgtacatgcttcggtcagggtcggggcaggtggaagtgtgatcccgtcgaccaatgccaggattcagagactgggacgttttatcaaattggagattcatgggagaagtatgtgcatggtgtcagataccagtgctactgctatggccgtggcattggggagtggcattgccaacctttacagacctatccaagctcaagtggtcctgtcgaagtatttatcactgagactccgagtcagcccaactcccaccccatccagtggaatgcaccacagccatctcacatttccaagtacattctcaggtggagacctaaaaattctgtaggccgttggaaggaagctaccataccaggccacttaaactcctacaccatcaaaggcctgaagcctggtgtggtatacgagggccagctcatcagcatccagcagtacggccaccaagaagtgactcgctttgacttcaccaccaccagcaccagcacacctgtgaccagcaacaccgtgacaggagagacgactcccttttctcctcttgtggccacttctgaatctgtgaccgaaatcacagccagtagctttgtggtctcctgggtctcagcttccgacaccgtgtcgggattccgggtggaatatgagctgagtgaggagggagatgagccacagtacctggatcttccaagcacagccacttctgtgaacatccctgacctgcttcctggccgaaaatacattgtaaatgtctatcagatatctgaggatggggagcagagtttgatcctgtctacttcacaaacaacagcgcctgatgcccctcctgacccgactgtggaccaagttgatgacacctcaattgttgttcgctggagcagaccccaggctcccatcacagggtacagaatagtctattcgccatcagtagaaggtagcagcacagaactcaaccttcctgaaactgcaaactccgtcaccctcagtgacttgcaacctggtgttcagtataacatcactatctatgctgtggaagaaaatcaagaaagtacacctgttgtcattcaacaagaaaccactggcaccccacgctcagatacagtgccctctcccagggacctgcagtttgtggaagtgacagacgtgaaggtcaccatcatgtggacaccgcctgagagtgcagtgaccggctaccgtgtggatgtgatccccgtcaacctgcctggcgagcacgggcagaggctgcccatcagcaggaacacctttgcagaagtcaccgggctgtcccctggggtcacctattacttcaaagtctttgcagtgagccatgggagggagagcaagcctctgactgctcaacagacaaccaaactggatgctcccactaacctccagtttgtcaatgaaactgattctactgtcctggtgagatggactccacctcgggcccagataacaggataccgactgaccgtgggccttacccgaagaggacagcccaggcagtacaatgtgggtccctctgtctccaagtacccactgaggaatctgcagcctgcatctgagtacaccgtatccctcgtggccataaagggcaaccaagagagccccaaagccactggagtctttaccacactgcagcctgggagctctattccaccttacaacaccgaggtgactgagaccaccattgtgatcacatggacgcctgctccaagaattggttttaagctgggtgtacgaccaagccagggaggagaggcaccacgagaagtgacttcagactcaggaagcatcgttgtgtccggcttgactccaggagtagaatacgtctacaccatccaagtcctgagagatggacaggaaagagatgcgccaattgtaaacaaagtggtgacaccattgtctccaccaacaaacttgcatctggaggcaaaccctgacactggagtgctcacagtctcctgggagaggagcaccaccccagacattactggttatagaattaccacaacccctacaaacggccagcagggaaattctttggaagaagtggtccatgctgatcagagctcctgcacttttgataacctgagtcccggcctggagtacaatgtcagtgtttacactgtcaaggatgacaaggaaagtgtccctatctctgataccatcatcccagctgttcctcctcccactgacctgcgattcaccaacattggtccagacaccatgcgtgtcacctgggctccacccccatccattgatttaaccaacttcctggtgcgttactcacctgtgaaaaatgaggaagatgttgcagagttgtcaatttctccttcagacaatgcagtggtcttaacaaatctcctgcctggtacagaatatgtagtgagtgtctccagtgtctacgaacaacatgagagcacacctcttagaggaagacagaaaacaggtcttgattccccaactggcattgacttttctgatattactgccaactcttttactgtgcactggattgctcctcgagccaccatcactggctacaggatccgccatcatcccgagcacttcagtgggagacctcgagaagatcgggtgccccactctcggaattccatcaccctcaccaacctcactccaggcacagagtatgtggtcagcatcgttgctcttaatggcagagaggaaagtcccttattgattggccaacaatcaacagtttctgatgttccgagggacctggaagttgttgctgcgacccccaccagcctactgatcagctgggatgctcctgctgtcacagtgagatattacaggatcacttacggagagacaggaggaaatagccctgtccaggagttcactgtgcctgggagcaagtctacagctaccatcagcggccttaaacctggagttgattataccatcactgtgtatgctgtcactggccgtggagacagccccgcaagcagcaagccaatttccattaattaccgaacagaaattgacaaaccatcccagatgcaagtgaccgatgttcaggacaacagcattagtgtcaagtggctgccttcaagttcccctgttactggttacagagtaaccaccactcccaaaaatggaccaggaccaacaaaaactaaaactgcaggtccagatcaaacagaaatgactattgaaggcttgcagcccacagtggagtatgtggttagtgtctatgctcagaatccaagcggagagagtcagcctctggttcagactgcagtaaccactattcctgcaccaactgacctgaagttcactcaggtcacacccacaagcctgagcgcccagtggacaccacccaatgttcagctcactggatatcgagtgcgggtgacccccaaggagaagaccggaccaatgaaagaaatcaaccttgctcctgacagctcatccgtggttgtatcaggacttatggtggccaccaaatatgaagtgagtgtctatgctcttaaggacactttgacaagcagaccagctcagggagttgtcaccactctggagaatgtcagcccaccaagaagggctcgtgtgacagatgctactgagaccaccatcaccattagctggagaaccaagactgagacgatcactggcttccaagttgatgccgttccagccaatggccagactccaatccagagaaccatcaagccagatgtcagaagctacaccatcacaggtttacaaccaggcactgactacaagatctacctgtacaccttgaatgacaatgctcggagctcccctgtggtcatcgacgcctccactgccattgatgcaccatccaacctgcgtttcctggccaccacacccaattccttgctggtatcatggcagccgccacgtgccaggattaccggctacatcatcaagtatgagaagcctgggtctcctcccagagaagtggtccctcggccccgccctggtgtcacagaggctactattactggcctggaaccgggaaccgaatatacaatttatgtcattgccctgaagaataatcagaagagcgagcccctgattggaaggaaaaagacagacgagcttccccaactggtaacccttccacaccccaatcttcatggaccagagatcttggatgttccttccacagttcaaaagacccctttcgtcacccaccctgggtatgacactggaaatggtattcagcttcctggcacttctggtcagcaacccagtgttgggcaacaaatgatctttgaggaacatggttttaggcggaccacaccgcccacaacggccacccccataaggcataggccaagaccatacccgccgaatgtaggtgaggaaatccaaattggtcacatccccagggaagatgtagactatcacctgtacccacacggtccgggactcaatccaaatgcctctacaggacaagaagctctctctcagacaaccatctcatgggccccattccaggacacttctgagtacatcatttcatgtcatcctgttggcactgatgaagaacccttacagttcagggttcctggaacttctaccagtgccactctgacaggcctcaccagaggtgccacctacaacatcatagtggaggcactgaaagaccagcagaggcataaggttcgggaagaggttgttaccgtgggcaactctgtcaacgaaggcttgaaccaacctacggatgactcgtgctttgacccctacacagtttcccattatgccgttggagatgagtgggaacgaatgtctgaatcaggctttaaactgttgtgccagtgcttaggctttggaagtggtcatttcagatgtgattcatctagatggtgccatgacaatggtgtgaactacaagattggagagaagtgggaccgtcagggagaaaatggccagatgatgagctgcacatgtcttgggaacggaaaaggagaattcaagtgtgaccctcatgaggcaacgtgttatgatgatgggaagacataccacgtaggagaacagtggcagaaggaatatctcggtgccatttgctcctgcacatgctttggaggccagcggggctggcgctgtgacaactgccgcagacctgggggtgaacccagtcccgaaggcactactggccagtcctacaaccagtattctcagagataccatcagagaacaaacactaatgttaattgcccaattgagtgcttcatgcctttagatgtacaggctgacagagaagattcccgagagtaaatcatctttccaatccagaggaacaagcatgtctctctgccaagatccatctaaactggagtgatgttagcagacccagcttagagttcttctttctttcttaagccctttgctctggaggaagttctccagcttcagctcaactcacagcttctccaagcatcaccctgggagtttcctgagggttttctcataaatgagggctgcacattgcctgttctgcttcgaagtattcaataccgctcagtattttaaatgaagtgattctaagatttggtttgggatcaataggaaagcatatgcagccaaccaagatgcaaatgttttgaaatgatatgaccaaaattttaagtaggaaagtcacccaaacacttctgctttcacttaagtgtctggcccgcaatactgtaggaacaagcatgatcttgttactgtgatattttaaatatccacagtactcactttttccaaatgatcctagtaattgcctagaaatatctttctcttacctgttatttatcaatttttcccagtatttttatacggaaaaaattgtattgaaaacacttagtatgcagttgataagaggaatttggtataattatggtgggtgattattttttatactgtatgtgccaaagctttactactgtggaaagacaactgttttaataaaagatttacattccacaacttgaagttcatctatttgatataagacaccttcgggggaaataattcctgtgaatattctttttcaattcagcaaacatttgaaaatctatgatgtgcaagtctaattgttgatttcagtacaagattttctaaatcagttgctacaaaaactgattggtttttgtcacttcatctcttcactaatggagatagctttacactttctgctttaatagatttaagtggaccccaatatttattaaaattgctagtttaccgttcagaagtataatagaaataatctttagttgctcttttctaaccattgtaattcttcccttcttccctccacctttccttcattgaataaacctctgttcaaagagattgcctgcaagggaaataaaaatgactaagatattaaaaaaaaaaaaaaaaaa

SEQ ID NO: 130 - DNA, 8374 bp, Homo sapiens
gcccgcgccggctgtgctgcacagggggaggagagggaaccccaggcgcgagcgggaagaggggacctgcagccacaacttctctggtcctctgcatcccttctgtccctccacccgtccccttccccaccctctggcccccaccttcttggaggcgacaacccccgggaggcattagaagggatttttcccgcaggttgcgaagggaagcaaacttggtggcaacttgcctcccggtgcgggcgtctctcccccaccgtctcaacatgcttaggggtccggggcccgggctgctgctgctggccgtccagtgcctggggacagcggtgccctccacgggagcctcgaagagcaagaggcaggctcagcaaatggttcagccccagtccccggtggctgtcagtcaaagcaagcccggttgttatgacaatggaaaacactatcagataaatcaacagtgggagcggacctacctaggcaatgcgttggtttgtacttgttatggaggaagccgaggttttaactgcgagagtaaacctgaagctgaagagacttgctttgacaagtacactgggaacacttaccgagtgggtgacacttatgagcgtcctaaagactccatgatctgggactgtacctgcatcggggctgggcgagggagaataagctgtaccatcgcaaaccgctgccatgaagggggtcagtcctacaagattggtgacacctggaggagaccacatgagactggtggttacatgttagagtgtgtgtgtcttggtaatggaaaaggagaatggacctgcaagcccatagctgagaagtgttttgatcatgctgctgggacttcctatgtggtcggagaaacgtgggagaagccctaccaaggctggatgatggtagattgtacttgcctgggagaaggcagcggacgcatcacttgcacttctagaaatagatgcaacgatcaggacacaaggacatcctatagaattggagacacctggagcaagaaggataatcgaggaaacctgctccagtgcatctgcacaggcaacggccgaggagagtggaagtgtgagaggcacacctctgtgcagaccacatcgagcggatctggccccttcaccgatgttcgtgcagctgtttaccaaccgcagcctcacccccagcctcctccctatggccactgtgtcacagacagtggtgtggtctactctgtggggatgcagtggctgaagacacaaggaaataagcaaatgctttgcacgtgcctgggcaacggagtcagctgccaagagacagctgtaacccagacttacggtggcaactcaaatggagagccatgtgtcttaccattcacctacaatggcaggacgttctactcctgcaccacagaagggcgacaggacggacatctttggtgcagcacaacttcgaattatgagcaggaccagaaatactctttctgcacagaccacactgttttggttcagactcgaggaggaaattccaatggtgccttgtgccacttccccttcctatacaacaaccacaattacactgattgcacttctgagggcagaagagacaacatgaagtggtgtgggaccacacagaactatgatgccgaccagaagtttgggttctgccccatggctgcccacgaggaaatctgcacaaccaatgaaggggtcatgtaccgcattggagatcagtgggataagcagcatgacatgggtcacatgatgaggtgcacgtgtgttgggaatggtcgtggggaatggacatgcattgcctactcgcagcttcgagatcagtgcattgttgatgacatcacttacaatgtgaacgacacattccacaagcgtcatgaagaggggcacatgctgaactgtacatgcttcggtcagggtcggggcaggtggaagtgtgatcccgtcgaccaatgccaggattcagagactgggacgttttatcaaattggagattcatgggagaagtatgtgcatggtgtcagataccagtgctactgctatggccgtggcattggggagtggcattgccaacctttacagacctatccaagctcaagtggtcctgtcgaagtatttatcactgagactccgagtcagcccaactcccaccccatccagtggaatgcaccacagccatctcacatttccaagtacattctcaggtggagacctaaaaattctgtaggccgttggaaggaagctaccataccaggccacttaaactcctacaccatcaaaggcctgaagcctggtgtggtatacgagggccagctcatcagcatccagcagtacggccaccaagaagtgactcgctttgacttcaccaccaccagcaccagcacacctgtgaccagcaacaccgtgacaggagagacgactcccttttctcctcttgtggccacttctgaatctgtgaccgaaatcacagccagtagctttgtggtctcctgggtctcagcttccgacaccgtgtcgggattccgggtggaatatgagctgagtgaggagggagatgagccacagtacctggatcttccaagcacagccacttctgtgaacatccctgacctgcttcctggccgaaaatacattgtaaatgtctatcagatatctgaggatggggagcagagtttgatcctgtctacttcacaaacaacagcgcctgatgcccctcctgacccgactgtggaccaagttgatgacacctcaattgttgttcgctggagcagaccccaggctcccatcacagggtacagaatagtctattcgccatcagtagaaggtagcagcacagaactcaaccttcctgaaactgcaaactccgtcaccctcagtgacttgcaacctggtgttcagtataacatcactatctatgctgtggaagaaaatcaagaaagtacacctgttgtcattcaacaagaaaccactggcaccccacgctcagatacagtgccctctcccagggacctgcagtttgtggaagtgacagacgtgaaggtcaccatcatgtggacaccgcctgagagtgcagtgaccggctaccgtgtggatgtgatccccgtcaacctgcctggcgagcacgggcagaggctgcccatcagcaggaacacctttgcagaagtcaccgggctgtcccctggggtcacctattacttcaaagtctttgcagtgagccatgggagggagagcaagcctctgactgctcaacagacaaccaaactggatgctcccactaacctccagtttgtcaatgaaactgattctactgtcctggtgagatggactccacctcgggcccagataacaggataccgactgaccgtgggccttacccgaagaggacagcccaggcagtacaatgtgggtccctctgtctccaagtacccactgaggaatctgcagcctgcatctgagtacaccgtatccctcgtggccataaagggcaaccaagagagccccaaagccactggagtctttaccacactgcagcctgggagctctattccaccttacaacaccgaggtgactgagaccaccattgtgatcacatggacgcctgctccaagaattggttttaagctgggtgtacgaccaagccagggaggagaggcaccacgagaagtgacttcagactcaggaagcatcgttgtgtccggcttgactccaggagtagaatacgtctacaccatccaagtcctgagagatggacaggaaagagatgcgccaattgtaaacaaagtggtgacaccattgtctccaccaacaaacttgcatctggaggcaaaccctgacactggagtgctcacagtctcctgggagaggagcaccaccccagacattactggttatagaattaccacaacccctacaaacggccagcagggaaattctttggaagaagtggtccatgctgatcagagctcctgcacttttgataacctgagtcccggcctggagtacaatgtcagtgtttacactgtcaaggatgacaaggaaagtgtccctatctctgataccatcatcccagctgttcctcctcccactgacctgcgattcaccaacattggtccagacaccatgcgtgtcacctgggctccacccccatccattgatttaaccaacttcctggtgcgttactcacctgtgaaaaatgaggaagatgttgcagagttgtcaatttctccttcagacaatgcagtggtcttaacaaatctcctgcctggtacagaatatgtagtgagtgtctccagtgtctacgaacaacatgagagcacacctcttagaggaagacagaaaacaggtcttgattccccaactggcattgacttttctgatattactgccaactcttttactgtgcactggattgctcctcgagccaccatcactggctacaggatccgccatcatcccgagcacttcagtgggagacctcgagaagatcgggtgccccactctcggaattccatcaccctcaccaacctcactccaggcacagagtatgtggtcagcatcgttgctcttaatggcagagaggaaagtcccttattgattggccaacaatcaacagtttctgatgttccgagggacctggaagttgttgctgcgacccccaccagcctactgatcagctgggatgctcctgctgtcacagtgagatattacaggatcacttacggagagacaggaggaaatagccctgtccaggagttcactgtgcctgggagcaagtctacagctaccatcagcggccttaaacctggagttgattataccatcactgtgtatgctgtcactggccgtggagacagccccgcaagcagcaagccaatttccattaattaccgaacagaaattgacaaaccatcccagatgcaagtgaccgatgttcaggacaacagcattagtgtcaagtggctgccttcaagttcccctgttactggttacagagtaaccaccactcccaaaaatggaccaggaccaacaaaaactaaaactgcaggtccagatcaaacagaaatgactattgaaggcttgcagcccacagtggagtatgtggttagtgtctatgctcagaatccaagcggagagagtcagcctctggttcagactgcagtaaccaacattgatcgccctaaaggactggcattcactgatgtggatgtcgattccatcaaaattgcttgggaaagcccacaggggcaagtttccaggtacagggtgacctactcgagccctgaggatggaatccatgagctattccctgcacctgatggtgaagaagacactgcagagctgcaaggcctcagaccgggttctgagtacacagtcagtgtggttgccttgcacgatgatatggagagccagcccctgattggaacccagtccacagctattcctgcaccaactgacctgaagttcactcaggtcacacccacaagcctgagcgcccagtggacaccacccaatgttcagctcactggatatcgagtgcgggtgacccccaaggagaagaccggaccaatgaaagaaatcaaccttgctcctgacagctcatccgtggttgtatcaggacttatggtggccaccaaatatgaagtgagtgtctatgctcttaaggacactttgacaagcagaccagctcagggagttgtcaccactctggagaatgtcagcccaccaagaagggctcgtgtgacagatgctactgagaccaccatcaccattagctggagaaccaagactgagacgatcactggcttccaagttgatgccgttccagccaatggccagactccaatccagagaaccatcaagccagatgtcagaagctacaccatcacaggtttacaaccaggcactgactacaagatctacctgtacaccttgaatgacaatgctcggagctcccctgtggtcatcgacgcctccactgccattgatgcaccatccaacctgcgtttcctggccaccacacccaattccttgctggtatcatggcagccgccacgtgccaggattaccggctacatcatcaagtatgagaagcctgggtctcctcccagagaagtggtccctcggccccgccctggtgtcacagaggctactattactggcctggaaccgggaaccgaatatacaatttatgtcattgccctgaagaataatcagaagagcgagcccctgattggaaggaaaaagacagttcaaaagacccctttcgtcacccaccctgggtatgacactggaaatggtattcagcttcctggcacttctggtcagcaacccagtgttgggcaacaaatgatctttgaggaacatggttttaggcggaccacaccgcccacaacggccacccccataaggcataggccaagaccatacccgccgaatgtaggacaagaagctctctctcagacaaccatctcatgggccccattccaggacacttctgagtacatcatttcatgtcatcctgttggcactgatgaagaacccttacagttcagggttcctggaacttctaccagtgccactctgacaggcctcaccagaggtgccacctacaacatcatagtggaggcactgaaagaccagcagaggcataaggttcgggaagaggttgttaccgtgggcaactctgtcaacgaaggcttgaaccaacctacggatgactcgtgctttgacccctacacagtttcccattatgccgttggagatgagtgggaacgaatgtctgaatcaggctttaaactgttgtgccagtgcttaggctttggaagtggtcatttcagatgtgattcatctagatggtgccatgacaatggtgtgaactacaagattggagagaagtgggaccgtcagggagaaaatggccagatgatgagctgcacatgtcttgggaacggaaaaggagaattcaagtgtgaccctcatgaggcaacgtgttatgatgatgggaagacataccacgtaggagaacagtggcagaaggaatatctcggtgccatttgctcctgcacatgctttggaggccagcggggctggcgctgtgacaactgccgcagacctgggggtgaacccagtcccgaaggcactactggccagtcctacaaccagtattctcagagataccatcagagaacaaacactaatgttaattgcccaattgagtgcttcatgcctttagatgtacaggctgacagagaagattcccgagagtaaatcatctttccaatccagaggaacaagcatgtctctctgccaagatccatctaaactggagtgatgttagcagacccagcttagagttcttctttctttcttaagccctttgctctggaggaagttctccagcttcagctcaactcacagcttctccaagcatcaccctgggagtttcctgagggttttctcataaatgagggctgcacattgcctgttctgcttcgaagtattcaataccgctcagtattttaaatgaagtgattctaagatttggtttgggatcaataggaaagcatatgcagccaaccaagatgcaaatgttttgaaatgatatgaccaaaattttaagtaggaaagtcacccaaacacttctgctttcacttaagtgtctggcccgcaatactgtaggaacaagcatgatcttgttactgtgatattttaaatatccacagtactcactttttccaaatgatcctagtaattgcctagaaatatctttctcttacctgttatttatcaatttttcccagtatttttatacggaaaaaattgtattgaaaacacttagtatgcagttgataagaggaatttggtataattatggtgggtgattattttttatactgtatgtgccaaagctttactactgtggaaagacaactgttttaataaaagatttacattccacaacttgaagttcatctatttgatataagacaccttcgggggaaataattcctgtgaatattctttttcaattcagcaaacatttgaaaatctatgatgtgcaagtctaattgttgatttcagtacaagattttctaaatcagttgctacaaaaactgattggtttttgtcacttcatctcttcactaatggagatagctttacactttctgctttaatagatttaagtggaccccaatatttattaaaattgctagtttaccgttcagaagtataatagaaataatctttagttgctcttttctaaccattgtaattcttcccttcttccctccacctttccttcattgaataaacctctgttcaaagagattgcctgcaagggaaataaaaatgactaagatattaaaaaaaaaaaaaaaaaa

SEQ ID NO: 131 - DNA, 8815 bp, Homo sapiens
gcccgcgccggctgtgctgcacagggggaggagagggaaccccaggcgcgagcgggaagaggggacctgcagccacaacttctctggtcctctgcatcccttctgtccctccacccgtccccttccccaccctctggcccccaccttcttggaggcgacaacccccgggaggcattagaagggatttttcccgcaggttgcgaagggaagcaaacttggtggcaacttgcctcccggtgcgggcgtctctcccccaccgtctcaacatgcttaggggtccggggcccgggctgctgctgctggccgtccagtgcctggggacagcggtgccctccacgggagcctcgaagagcaagaggcaggctcagcaaatggttcagccccagtccccggtggctgtcagtcaaagcaagcccggttgttatgacaatggaaaacactatcagataaatcaacagtgggagcggacctacctaggcaatgcgttggtttgtacttgttatggaggaagccgaggttttaactgcgagagtaaacctgaagctgaagagacttgctttgacaagtacactgggaacacttaccgagtgggtgacacttatgagcgtcctaaagactccatgatctgggactgtacctgcatcggggctgggcgagggagaataagctgtaccatcgcaaaccgctgccatgaagggggtcagtcctacaagattggtgacacctggaggagaccacatgagactggtggttacatgttagagtgtgtgtgtcttggtaatggaaaaggagaatggacctgcaagcccatagctgagaagtgttttgatcatgctgctgggacttcctatgtggtcggagaaacgtgggagaagccctaccaaggctggatgatggtagattgtacttgcctgggagaaggcagcggacgcatcacttgcacttctagaaatagatgcaacgatcaggacacaaggacatcctatagaattggagacacctggagcaagaaggataatcgaggaaacctgctccagtgcatctgcacaggcaacggccgaggagagtggaagtgtgagaggcacacctctgtgcagaccacatcgagcggatctggccccttcaccgatgttcgtgcagctgtttaccaaccgcagcctcacccccagcctcctccctatggccactgtgtcacagacagtggtgtggtctactctgtggggatgcagtggctgaagacacaaggaaataagcaaatgctttgcacgtgcctgggcaacggagtcagctgccaagagacagctgtaacccagacttacggtggcaactcaaatggagagccatgtgtcttaccattcacctacaatggcaggacgttctactcctgcaccacagaagggcgacaggacggacatctttggtgcagcacaacttcgaattatgagcaggaccagaaatactctttctgcacagaccacactgttttggttcagactcgaggaggaaattccaatggtgccttgtgccacttccccttcctatacaacaaccacaattacactgattgcacttctgagggcagaagagacaacatgaagtggtgtgggaccacacagaactatgatgccgaccagaagtttgggttctgccccatggctgcccacgaggaaatctgcacaaccaatgaaggggtcatgtaccgcattggagatcagtgggataagcagcatgacatgggtcacatgatgaggtgcacgtgtgttgggaatggtcgtggggaatggacatgcattgcctactcgcagcttcgagatcagtgcattgttgatgacatcacttacaatgtgaacgacacattccacaagcgtcatgaagaggggcacatgctgaactgtacatgcttcggtcagggtcggggcaggtggaagtgtgatcccgtcgaccaatgccaggattcagagactgggacgttttatcaaattggagattcatgggagaagtatgtgcatggtgtcagataccagtgctactgctatggccgtggcattggggagtggcattgccaacctttacagacctatccaagctcaagtggtcctgtcgaagtatttatcactgagactccgagtcagcccaactcccaccccatccagtggaatgcaccacagccatctcacatttccaagtacattctcaggtggagacctaaaaattctgtaggccgttggaaggaagctaccataccaggccacttaaactcctacaccatcaaaggcctgaagcctggtgtggtatacgagggccagctcatcagcatccagcagtacggccaccaagaagtgactcgctttgacttcaccaccaccagcaccagcacacctgtgaccagcaacaccgtgacaggagagacgactcccttttctcctcttgtggccacttctgaatctgtgaccgaaatcacagccagtagctttgtggtctcctgggtctcagcttccgacaccgtgtcgggattccgggtggaatatgagctgagtgaggagggagatgagccacagtacctggatcttccaagcacagccacttctgtgaacatccctgacctgcttcctggccgaaaatacattgtaaatgtctatcagatatctgaggatggggagcagagtttgatcctgtctacttcacaaacaacagcgcctgatgcccctcctgacccgactgtggaccaagttgatgacacctcaattgttgttcgctggagcagaccccaggctcccatcacagggtacagaatagtctattcgccatcagtagaaggtagcagcacagaactcaaccttcctgaaactgcaaactccgtcaccctcagtgacttgcaacctggtgttcagtataacatcactatctatgctgtggaagaaaatcaagaaagtacacctgttgtcattcaacaagaaaccactggcaccccacgctcagatacagtgccctctcccagggacctgcagtttgtggaagtgacagacgtgaaggtcaccatcatgtggacaccgcctgagagtgcagtgaccggctaccgtgtggatgtgatccccgtcaacctgcctggcgagcacgggcagaggctgcccatcagcaggaacacctttgcagaagtcaccgggctgtcccctggggtcacctattacttcaaagtctttgcagtgagccatgggagggagagcaagcctctgactgctcaacagacaaccaaactggatgctcccactaacctccagtttgtcaatgaaactgattctactgtcctggtgagatggactccacctcgggcccagataacaggataccgactgaccgtgggccttacccgaagaggacagcccaggcagtacaatgtgggtccctctgtctccaagtacccactgaggaatctgcagcctgcatctgagtacaccgtatccctcgtggccataaagggcaaccaagagagccccaaagccactggagtctttaccacactgcagcctgggagctctattccaccttacaacaccgaggtgactgagaccaccattgtgatcacatggacgcctgctccaagaattggttttaagctgggtgtacgaccaagccagggaggagaggcaccacgagaagtgacttcagactcaggaagcatcgttgtgtccggcttgactccaggagtagaatacgtctacaccatccaagtcctgagagatggacaggaaagagatgcgccaattgtaaacaaagtggtgacaccattgtctccaccaacaaacttgcatctggaggcaaaccctgacactggagtgctcacagtctcctgggagaggagcaccaccccagacattactggttatagaattaccacaacccctacaaacggccagcagggaaattctttggaagaagtggtccatgctgatcagagctcctgcacttttgataacctgagtcccggcctggagtacaatgtcagtgtttacactgtcaaggatgacaaggaaagtgtccctatctctgataccatcatcccagaggtgccccaactcactgacctaagctttgttgatataaccgattcaagcatcggcctgaggtggaccccgctaaactcttccaccattattgggtaccgcatcacagtagttgcggcaggagaaggtatccctatttttgaagattttgtggactcctcagtaggatactacacagtcacagggctggagccgggcattgactatgatatcagcgttatcactctcattaatggcggcgagagtgcccctactacactgacacaacaaacggctgttcctcctcccactgacctgcgattcaccaacattggtccagacaccatgcgtgtcacctgggctccacccccatccattgatttaaccaacttcctggtgcgttactcacctgtgaaaaatgaggaagatgttgcagagttgtcaatttctccttcagacaatgcagtggtcttaacaaatctcctgcctggtacagaatatgtagtgagtgtctccagtgtctacgaacaacatgagagcacacctcttagaggaagacagaaaacaggtcttgattccccaactggcattgacttttctgatattactgccaactcttttactgtgcactggattgctcctcgagccaccatcactggctacaggatccgccatcatcccgagcacttcagtgggagacctcgagaagatcgggtgccccactctcggaattccatcaccctcaccaacctcactccaggcacagagtatgtggtcagcatcgttgctcttaatggcagagaggaaagtcccttattgattggccaacaatcaacagtttctgatgttccgagggacctggaagttgttgctgcgacccccaccagcctactgatcagctgggatgctcctgctgtcacagtgagatattacaggatcacttacggagagacaggaggaaatagccctgtccaggagttcactgtgcctgggagcaagtctacagctaccatcagcggccttaaacctggagttgattataccatcactgtgtatgctgtcactggccgtggagacagccccgcaagcagcaagccaatttccattaattaccgaacagaaattgacaaaccatcccagatgcaagtgaccgatgttcaggacaacagcattagtgtcaagtggctgccttcaagttcccctgttactggttacagagtaaccaccactcccaaaaatggaccaggaccaacaaaaactaaaactgcaggtccagatcaaacagaaatgactattgaaggcttgcagcccacagtggagtatgtggttagtgtctatgctcagaatccaagcggagagagtcagcctctggttcagactgcagtaaccaacattgatcgccctaaaggactggcattcactgatgtggatgtcgattccatcaaaattgcttgggaaagcccacaggggcaagtttccaggtacagggtgacctactcgagccctgaggatggaatccatgagctattccctgcacctgatggtgaagaagacactgcagagctgcaaggcctcagaccgggttctgagtacacagtcagtgtggttgccttgcacgatgatatggagagccagcccctgattggaacccagtccacagctattcctgcaccaactgacctgaagttcactcaggtcacacccacaagcctgagcgcccagtggacaccacccaatgttcagctcactggatatcgagtgcgggtgacccccaaggagaagaccggaccaatgaaagaaatcaaccttgctcctgacagctcatccgtggttgtatcaggacttatggtggccaccaaatatgaagtgagtgtctatgctcttaaggacactttgacaagcagaccagctcagggagttgtcaccactctggagaatgtcagcccaccaagaagggctcgtgtgacagatgctactgagaccaccatcaccattagctggagaaccaagactgagacgatcactggcttccaagttgatgccgttccagccaatggccagactccaatccagagaaccatcaagccagatgtcagaagctacaccatcacaggtttacaaccaggcactgactacaagatctacctgtacaccttgaatgacaatgctcggagctcccctgtggtcatcgacgcctccactgccattgatgcaccatccaacctgcgtttcctggccaccacacccaattccttgctggtatcatggcagccgccacgtgccaggattaccggctacatcatcaagtatgagaagcctgggtctcctcccagagaagtggtccctcggccccgccctggtgtcacagaggctactattactggcctggaaccgggaaccgaatatacaatttatgtcattgccctgaagaataatcagaagagcgagcccctgattggaaggaaaaagacagacgagcttccccaactggtaacccttccacaccccaatcttcatggaccagagatcttggatgttccttccacagttcaaaagacccctttcgtcacccaccctgggtatgacactggaaatggtattcagcttcctggcacttctggtcagcaacccagtgttgggcaacaaatgatctttgaggaacatggttttaggcggaccacaccgcccacaacggccacccccataaggcataggccaagaccatacccgccgaatgtaggtgaggaaatccaaattggtcacatccccagggaagatgtagactatcacctgtacccacacggtccgggactcaatccaaatgcctctacaggacaagaagctctctctcagacaaccatctcatgggccccattccaggacacttctgagtacatcatttcatgtcatcctgttggcactgatgaagaacccttacagttcagggttcctggaacttctaccagtgccactctgacaggcctcaccagaggtgccacctacaacatcatagtggaggcactgaaagaccagcagaggcataaggttcgggaagaggttgttaccgtgggcaactctgtcaacgaaggcttgaaccaacctacggatgactcgtgctttgacccctacacagtttcccattatgccgttggagatgagtgggaacgaatgtctgaatcaggctttaaactgttgtgccagtgcttaggctttggaagtggtcatttcagatgtgattcatctagatggtgccatgacaatggtgtgaactacaagattggagagaagtgggaccgtcagggagaaaatggccagatgatgagctgcacatgtcttgggaacggaaaaggagaattcaagtgtgaccctcatgaggcaacgtgttatgatgatgggaagacataccacgtaggagaacagtggcagaaggaatatctcggtgccatttgctcctgcacatgctttggaggccagcggggctggcgctgtgacaactgccgcagacctgggggtgaacccagtcccgaaggcactactggccagtcctacaaccagtattctcagagataccatcagagaacaaacactaatgttaattgcccaattgagtgcttcatgcctttagatgtacaggctgacagagaagattcccgagagtaaatcatctttccaatccagaggaacaagcatgtctctctgccaagatccatctaaactggagtgatgttagcagacccagcttagagttcttctttctttcttaagccctttgctctggaggaagttctccagcttcagctcaactcacagcttctccaagcatcaccctgggagtttcctgagggttttctcataaatgagggctgcacattgcctgttctgcttcgaagtattcaataccgctcagtattttaaatgaagtgattctaagatttggtttgggatcaataggaaagcatatgcagccaaccaagatgcaaatgttttgaaatgatatgaccaaaattttaagtaggaaagtcacccaaacacttctgctttcacttaagtgtctggcccgcaatactgtaggaacaagcatgatcttgttactgtgatattttaaatatccacagtactcactttttccaaatgatcctagtaattgcctagaaatatctttctcttacctgttatttatcaatttttcccagtatttttatacggaaaaaattgtattgaaaacacttagtatgcagttgataagaggaatttggtataattatggtgggtgattattttttatactgtatgtgccaaagctttactactgtggaaagacaactgttttaataaaagatttacattccacaacttgaagttcatctatttgatataagacaccttcgggggaaataattcctgtgaatattctttttcaattcagcaaacatttgaaaatctatgatgtgcaagtctaattgttgatttcagtacaagattttctaaatcagttgctacaaaaactgattggtttttgtcacttcatctcttcactaatggagatagctttacactttctgctttaatagatttaagtggaccccaatatttattaaaattgctagtttaccgttcagaagtataatagaaataatctttagttgctcttttctaaccattgtaattcttcccttcttccctccacctttccttcattgaataaacctctgttcaaagagattgcctgcaagggaaataaaaatgactaagatattaaaaaaaaaaaaaaaaaa

SEQ ID NO: 132 - DNA, 7314 bp, Homo sapiens
ctgctcgtggaagggaggaggaggaatgtggaaggtggcggcgcgcgagctgacaggcggttcctcgggcgggctgcggcgacggcccgagcgcttctccttcgccgaggttgcgcgccccctcctcgccgtgccccgggcccgcgcgggatcgtgcgtcgtcccgccgcgtccctgaagggaaggaagcgaggcggcggcggcggcgcccgggagccggagccttcgcggcgtccacgtccctcccccgctgcaccccgccccggcgcgagaggagagcgcgagagccccagccgcgggcgggcgggcggcgaagatggcagaggcaccggcttccccggccccgctctctccgctcgaagtggagctggacccggagttcgagccccagagccgtccgcgatcctgtacgtggcccctgcaaaggccggagctccaagcgagccctgccaagccctcgggggagacggccgccgactccatgatccccgaggaggaggacgatgaagacgacgaggacggcgggggacgggccggctcggccatggcgatcggcggcggcggcgggagcggcacgctgggctccgggctgctccttgaggactcggcccgggtgctggcacccggagggcaagaccccgggtctgggccagccaccgcggcgggcgggctgagcgggggtacacaggcgctgctgcagcctcagcaaccgctgccaccgccgcagccgggggcggctgggggctccgggcagccgaggaaatgttcgtcgcggcggaacgcctggggaaacctgtcctacgcggacctgatcacccgcgccatcgagagctccccggacaaacggctcactctgtcccagatctacgagtggatggtgcgttgcgtgccctacttcaaggataagggcgacagcaacagctctgccggctggaagaactccatccggcacaacctgtcactgcatagtcgattcatgcgggtccagaatgagggaactggcaagagctcttggtggatcatcaaccctgatggggggaagagcggaaaagccccccggcggcgggctgtctccatggacaatagcaacaagtataccaagagccgtggccgcgcagccaagaagaaggcagccctgcagacagcccccgaatcagctgacgacagtccctcccagctctccaagtggcctggcagccccacgtcacgcagcagtgatgagctggatgcgtggacggacttccgttcacgcaccaattctaacgccagcacagtcagtggccgcctgtcgcccatcatggcaagcacagagttggatgaagtccaggacgatgatgcgcctctctcgcccatgctctacagcagctcagccagcctgtcaccttcagtaagcaagccgtgcacggtggaactgccacggctgactgatatggcaggcaccatgaatctgaatgatgggctgactgaaaacctcatggacgacctgctggataacatcacgctcccgccatcccagccatcgcccactgggggactcatgcagcggagctctagcttcccgtataccaccaagggctcgggcctgggctccccaaccagctcctttaacagcacggtgttcggaccttcatctctgaactccctacgccagtctcccatgcagaccatccaagagaacaagccagctaccttctcttccatgtcacactatggtaaccagacactccaggacctgctcacttcggactcacttagccacagcgatgtcatgatgacacagtcggaccccttgatgtctcaggccagcaccgctgtgtctgcccagaattcccgccggaacgtgatgcttcgcaatgatccgatgatgtcctttgctgcccagcctaaccagggaagtttggtcaatcagaacttgctccaccaccagcaccaaacccagggcgctcttggtggcagccgtgccttgtcgaattctgtcagcaacatgggcttgagtgagtccagcagccttgggtcagccaaacaccagcagcagtctcctgtcagccagtctatgcaaaccctctcggactctctctcaggctcctccttgtactcaactagtgcaaacctgcccgtcatgggccatgagaagttccccagcgacttggacctggacatgttcaatgggagcttggaatgtgacatggagtccattatccgtagtgaactcatggatgctgatgggttggattttaactttgattccctcatctccacacagaatgttgttggtttgaacgtggggaacttcactggtgctaagcaggcctcatctcagagctgggtgccaggctgaaggatcactgaggaaggggaagtgggcaaagcagaccctcaaactgacacaagacctacagagaaaaccctttgccaaatctgctctcagcaagtggacagtgataccgtttacagcttaacacctttgtgaatcccacgccattttcctaacccagcagagactgttaatggccccttaccctgggtgaagcacttacccttggaacagaactctaaaaagtatgcaaaatcttccttgtacagggtggtgagccgcctgccagtggaggacagcacccctcagcaccacccaccctcattcagagcacaccgtgagcccccgtcggccattctgtggtgttttaatattgcgatggtttatgggacgttttaagtgttgttcttgtgtttgttttcctttgactttctgagtttttcacatgcattaacttgcggtatttttctgttaaaatgttaaccgtccttcccctagcaaatttaaaaacagaaagaaaatgttgtaccagttaccattccgggttcgagcatcacaagcttttgagcgcatggaactccataaactaacaaattacataaactaaagggggattttctttcttcttttgtttggtagaaaattatccttttctaaaaactgaacaatggcacaattgtttgctatgtgcacccgtccaggacagaaccgtgcataggcaaaaggagtggagcacagcgtccggcccagtgtgtttccggttctgagtcagggtgatctgtggacgggaccccagcaccaagtctacgggtgccagatcagtagggcctgtgatttcctgtcagtgtcctcagctaatgtgaacagtgttggtctgctggttagaaactagaatattgatattttcaggaaagaaatcagctcagctctccactcattgccaaatgtcactaaagggtttagttttaaggagaaagaaaaggaaaaaaaaaaaaaacaaaaaagtcctgttttgctttgcagaacaaatgaacttacaggtgagcattaagcttgcagtgagaaatgtgcgaagagtaaaaacccaagtcaatgctgaggcagttctaacttcactgttttcctaaatacacatccttgattattttcagccttgctatataatctgatctgctagaagtgtatgagtgagaggcaatagcatacaaactgattttttaaatataagcttaggttgtaattgtacaagtgactcaatggaagtacaaaatagggcagttttaacttttttttctgcttctatggatttcattttgttgtgttttcaaaaagttatggtgctgtataggtgctttctgtttaacctggaaagtgtgattatattcgttaccttctttggtagacggaatagttgggaccacctttggtacataagaaattggtataacgatgctctgattagcacagtatatgcatacttctccaaagtgatatatgaagactcttttctttgcataaaaagcattaggcatataaatgtataaatatattttatcatgtacagtacaaaaatggaaccttatgcatgggccttaggaatacaggctagtatttcagcacagacttccctgcttgagttcttgctgatgcttgcaccgtgacagtgggcaccaacacagacgtgccacccaaccccctgcacacaccaccggccaccaggggcccccttgtgcgccttggctttataactcctctgggggtgatattggtggtgatcacagctcctagcataatgagagttccatttggtattgtcacacgtctcctgcctcgcttgggttgccatgtttgagcgatggccctgttgatttcaccctgccttttactgaatctgtaaattgttgtgcaattgtggttatagtagactgtagcacattgccttttctaaactgctacatgtttataatcttcatttttaaagtatgtgtaatttttttaagtatgtattctattcatatggtctgcttgtcagtgagccagacttgcttactatattcctttataataatgctagccacttcctggattctttagtaatgtgctgtatgcaagaactttccagtagcagtgaaggagggttgcctctccaagcttcctaagggatgctgccctgtgtggggatgcattgcagaggcactagtagcatgggggctagagtggggagcgagatgtaaaagggtggggggataggagaattccagagtgcttccagcattagggtcctgagaacttctgagttcagagaaacatgcaaagtgactaacaaaatagctacttacctttgcagttttacagaccctgggagctgctttgggagtgagaaaggcaaccctccaatgtgtttcaactttaaaatgttgaattcttttcagacatggtatctcatttattctccttttctagcgtttgttgaatttcaggcagaatgtcttacagaatgtcctagaaccagattatcatttaatctgaaacagctgaggaagggacagagaaggtacaagggcaaggcagcacaaaacagatcaggagaatgaagagggaatgctttggttttttgttttgttttgttttttctttttcaagtaactaaaacagcatctacatgtagagtgttgtggagagctgagaccagggtaaagtcaagtgcagcatcagtactgcgagacccaccagcccctggagagggtcagccgagaatctggtagtgaagcctgtctagggtcccggcaccctcaccctcagccacctgcagagaggccagggccccagagactagcctggttctgaagtgggcaggggtgctgccagagccctctgccccttatgttgagaccctgctttcaggacaggccagccgttggccaccatgtcacattctgagtgagtgtcacaggtccctaacaataattttctgatctggagcatatcagcagaatgcttagcctcaaggggcctggcagctgtaatgtttgatttatgatgagaactatccgaggccacccttggcctctaaataagctgctctagggagccgcctactttttgatgagaaattagaagagtacctaatgttgaaaacatgacatgcgctcttgggatctgctgttctctccagggctccagaacctgatacctgttaccaaagctaggaaagagctttatcacaagccttcactgtcctggcatgagaactggctgccaggctcagtgtaccccattaactgtgaatgaatctgagcttggtttcctttattgcttcctctgcaatatgattgctgaaacacattttaaaaattcagaagcttgtcactcctgttaatgggaggatcagtcacacatgtgtagtacaaggcggactttgtgtttgtttttggtgttaatttttagcattgtgtgtgttgcttccccaccctgaggagaggacaccatggcttactactcaggacaagtatgccccgctcagggtgtgatttcaggtggcttccaaacttgtacgcagtttaaagatggtggggacagactttgcctctacctagtgaaccccacttaaagaataaggagcatttgaatctcttggaaaaggccatgaagaataaagcagtcaaaaagaagtcctccatgttggtgccaaggacttgcgaggggaaataaaaatgttatccagcctgaccaacatggagaaaccccgtctccattaaaaatacaaaattagcctggcatggtggcgcatgcctgtaatcccagctactctggaggctgaggcaggagaatcgcttgaacccaggaggcggaggtcgcagtgagccgagatcatgccagtgcactccagcctgggtaacaagagtgaaactccgtgtcaaaaaaaaaaaaaaaatgttactcatcctctctgaaagcaaaaaggaaaccctaacagctctgaactctggttttatttttcttgctgtatttgggtgaacattgtatgattaggcataatgttaaaaaaaaaaatttttttttggtagaaatgcaatcaccagtaaagaggtacgaaaaagctagcctctctcagagaccggggaggcagagtactactagaggaagtgaagttctgatggaatcatgcctgtcaaatgaggtcttgaagcggatgcccaaataaaagagtatattttatctaaatcttaagtgggtaacattttatgcagtttaaatgaatggaatattttcctcttgtttagttgtatctgtttgtatttttctttgatgaatgattggtcatgaggcctcttgccacactccagaaatacgtgtgcggctgcttttaagaactatgtgtctggtcacttatttctctaaaattatctcattgcctggcaatcagtcttctcttgtatacttgtcctagcacattatgtacatgggaaatgtaaacaaatgtgaaggaggaccagaaaaattagttaatatttaaaaaaatgtattgtgcattttggcttcacatgtttaactttttttaagaaaaaagttgcatgaatggaaaaaaaaatctgtatacagtatctgtaaaaactatcttatctgtttcaattccttgctcatatcccatataatctagaactaaatatggtgtgtggccatatttaaacacctgagagtcaagcagttgagactttgatttgaagcacctcatccttctttcaatgcgaacactatcatatggcattcttactgaggattttgtctaaccatatgttgccatgaattaactctgccgcctttcttaaggatcaaaaccagtttgatttgggaatcttcccctttccaaatgaaatagagatgcagtacttaactttccttggtgtttgtagatattgccttgtgtattccacttaaaaccgtaatctagtttgtaaaagagatggtgacgcatgtaaataaagcatcagtgacactct

SEQ ID NO: 133 - DNA, 3823 bp, Homo sapiens
ataaaacctggagcgcaggatcgcgcccaggagcggcgagctagcggacgcaaagactgggcatgctccgcggcggcgcaggttttggtcacaagtaggaagaagccagtgcaccagaccggcaaagagaagcgggagccgccgcggcagcgcggccgtggggtccgccgccgccgcatcggagcgggaggaggagcagcggggagggcgaggccgccgggccgagagccgtcccgcctgctctcggtcttctgccttcgcctccgcgcggtgcgtcggacccagggtctgtcacctgggcgccaggggccgccgccggggagccggagcgggcaggaccctccctccgccgactgcggcccgagagcgcccccgcggggtggagcggcagccgccttctgcgggcggctgagtgtccgtctcgcgcccggagcgggcgaccgccgtcagcccggaggaggaggaggaggaggagggggcggccatggggctgctgtcccagggctcgccgctgagctgggaggaaaccaagcgccatgccgaccacgtgcggcggcacgggatcctccagttcctgcacatctaccacgccgtcaaggaccggcacaaggacgttctcaagtggggcgatgaggtggaatacatgttggtatcttttgatcatgaaaataaaaaagtccggttggtcctgtctggggagaaagttcttgaaactctgcaagagaagggggaaaggacaaacccaaaccatcctaccctttggagaccagagtatgggagttacatgattgaagggacaccaggacagccctacggaggaacaatgtccgagttcaatacagttgaggccaacatgcgaaaacgccggaaggaggctacttctatattagaagaaaatcaggctctttgcacaataacttcatttcccagattaggctgtcctgggttcacactgcccgaggtcaaacccaacccagtggaaggaggagcttccaagtccctcttctttccagatgaagcaataaacaagcaccctcgcttcagtaccttaacaagaaatatccgacataggagaggagaaaaggttgtcatcaatgtaccaatatttaaggacaagaatacaccatctccatttatagaaacatttactgaggatgatgaagcttcaagggcttctaagccggatcatatttacatggatgccatgggatttggaatgggcaattgctgtctccaggtgacattccaagcctgcagtatatctgaggccagatacctttatgatcagttggctactatctgtccaattgttatggctttgagtgctgcatctcccttttaccgaggctatgtgtcagacattgattgtcgctggggagtgatttctgcatctgtagatgatagaactcgggaggagcgaggactggagccattgaagaacaataactataggatcagtaaatcccgatatgactcaatagacagctatttatctaagtgtggtgagaaatataatgacatcgacttgacgatagataaagagatctacgaacagctgttgcaggaaggcattgatcatctcctggcccagcatgttgctcatctctttattagagacccactgacactgtttgaagagaaaatacacctggatgatgctaatgagtctgaccattttgagaatattcagtccacaaattggcagacaatgagatttaagccccctcctccaaactcagacattggatggagagtagaatttcgacccatggaggtgcaattaacagactttgagaactctgcctatgtggtgtttgtggtactgctcaccagagtgatcctttcctacaaattggattttctcattccactgtcaaaggttgatgagaacatgaaggtagcacagaaaagagatgctgtcttgcagggaatgttttatttcaggaaagatatttgcaaaggtggcaatgcagtggtggatggttgtggcaaggcccagaacagcacggagctcgctgcagaggagtacaccctcatgagcatagacaccatcatcaatgggaaggaaggtgtgtttcctggactgatcccaattctgaactcttaccttgaaaacatggaagtggatgtggacaccagatgtagtattctgaactacctaaagctaattaagaagagagcatctggagaactaatgacagttgccagatggatgagggagtttatcgcaaaccatcctgactacaagcaagacagtgtcataactgatgaaatgaattatagccttattttgaagtgtaaccaaattgcaaatgaattatgtgaatgcccagagttacttggatcagcatttaggaaagtaaaatatagtggaagtaaaactgactcatccaactagacattctacagaaagaaaaatgcattattgacgaactggctacagtaccatgcctctcagccagcccgtgtgtataatatgaagaccaaatgatagaactgtactgttttctgggccagtgagccagaaattgattaaggctttctttggtaggtaaatctagagtttatacagtgtacatgtacatagtaaagtatttttgattaacaatgtattttaataacatatctaaagtcatcatgaactggcttgtacatttttaaattcttactctggagcaacctactgtctaagcagttttgtaaatgtactggtaattgtacaatacttgcattccagagttaaaatgtttactgtaaatttttgttcttttaaagactacctgggacctgatttattgaaatttttctctttaaaaacattttctctcgttaattttcctttgtcatttcctttgttgtctacattaaatcacttgaatccattgaaagtgcttcaagggtaatcttgggtttctagcaccttatctatgatgtttcttttgcaattggaataatcacttggtcaccttgccccaagctttcccctctgaataaatacccattgaactctgatggctgttatcaaaggaacttttctttgtttaaatttgctgatgcaggaattaagtttaaacacaactctatagaaagaaaggagattattacccagaattcacatgtagtgattattaaggacaatttttttttttaactaaaaaagttggcggcaggggtggggggtggcaatcatttttcttcctatacatacaaaggatattgtcaaaaatggcgttcttctcttgtggcctgttattctgattgctgctgtatacagttttgtcactctttagtttttagttaagcatactgatagactttcctctaaaagccattcactccagattttacctggggaatattctacatactgcttactttctctataaaactcatcaataaatcatgaaaggcactgagttttgtaaatcaggaccctaaatgtttaattgtaaataagtttcagataattattatagctttgcgttgaagtttgttgttttttttctcaactagttaagtcaactgcttctgaaataactctgtattgtagattatgcagatctttacaggcataaatatttaaactgtaatatgctaacttgaagagattgcaataaagctgcttcagctaaccctgtttatgtttaaatactagggtttgttctatattttatacatgcattttggatgattaaagaatgcctggttttcgtttgcaatttgcttgtgtaaatcaggttgtaaaaaggcagataaattgaaatgtttgtggtatgaggaaataaaagaatggaattagctttcattcagaaaaaaaaaaaaa

SEQ ID NO: 134 - DNA, 5291 bp, Homo sapiens
ctagggcatggcatcccacgtgggtgtcagcacggccgcagaagaaccacttctctggcccacccatgcctgctaggccatgcttcttcagaagtggccacaactctcctgacgtctccagagccggtcattccacccagggggacttcagctgccactggacacttcaattgtacgctgcgaccagttgccaggaaggagagggctggcaagagagccgcggcagccgtggcagggtgtaggggacggtggacggccagggcccccccctctctctctttctctctctctctcttgcttggtttctgtaatgaggaagttctccgcagctcagtttcctttccctcactgagcgcctgaaacaggaagtcagtcagttaagctggtggcagcagccgaggccaccaagaggcaacgggcggcaggttgcagtggaggggcctccgctcccctcggtggtgtgtgggtcctgggggtgcctgccggcccggccgaggaggcccacgcccaccatggtcccctgctggaaccatggcaacatcacccgctccaaggcggaggagctgctttccaggacaggcaaggacgggagcttcctcgtgcgtgccagcgagtccatctcccgggcatacgcgctctgcgtgctgtatcggaattgcgtttacacttacagaattctgcccaatgaagatgataaattcactgttcaggcatccgaaggcgtctccatgaggttcttcaccaagctggaccagctcatcgagttttacaagaaggaaaacatggggctggtgacccatctgcaataccctgtgccgctggaggaagaggacacaggcgacgaccctgaggaggacacagaaagtgtcgtgtctccacccgagctgcccccaagaaacatcccgctgactgccagctcctgtgaggccaaggaggttcctttttcaaacgagaatccccgagcgaccgagaccagccggccgagcctctccgagacattgttccagcgactgcaaagcatggacaccagtgggcttccagaagagcatcttaaggccatccaagattatttaagcactcagctcgcccaggactctgaatttgtgaagacagggtccagcagtcttcctcacctgaagaaactgaccacactgctctgcaaggagctctatggagaagtcatccggaccctcccatccctggagtctctgcagaggttatttgaccagcagctctccccgggcctccgtccacgtcctcaggttcctggtgaggccaatcccatcaacatggtgtccaagctcagccaactgacaagcctgttgtcgtccattgaagacaaggtcaaggccttgctgcacgagggtcctgagtctccgcaccggccctcccttatccctccagtcacctttgaggtgaaggcagagtctctggggattcctcagaaaatgcagctcaaagtcgacgttgagtctgggaaactgatcattaagaagtccaaggatggttctgaggacaagttctacagccacaagaaaatcctgcagctcattaagtcacagaaatttctgaataagttggtgatcttggtggaaacagagaaggagaagatcctgcggaaggaatatgtttttgctgactccaaaaagagagaaggcttctgccagctcctgcagcagatgaagaacaagcactcagagcagccggagcccgacatgatcaccatcttcatcggcacctggaacatgggtaacgccccccctcccaagaagatcacgtcctggtttctctccaaggggcagggaaagacgcgggacgactctgcggactacatcccccatgacatttacgtgatcggcacccaagaggaccccctgagtgagaaggagtggctggagatcctcaaacactccctgcaagaaatcaccagtgtgacttttaaaacagtcgccatccacacgctctggaacatccgcatcgtggtgctggccaagcctgagcacgagaaccggatcagccacatctgtactgacaacgtgaagacaggcattgcaaacacactggggaacaagggagccgtgggggtgtcgttcatgttcaatggaacctccttagggttcgtcaacagccacttgacttcaggaagtgaaaagaaactcaggcgaaaccaaaactatatgaacattctccggttcctggccctgggcgacaagaagctgagtccctttaacatcactcaccgcttcacgcacctcttctggtttggggatcttaactaccgtgtggatctgcctacctgggaggcagaaaccatcatccagaaaatcaagcagcagcagtacgcagacctcctgtcccacgaccagctgctcacagagaggagggagcagaaggtcttcctacacttcgaggaggaagaaatcacgtttgccccaacctaccgttttgagagactgactcgggacaaatacgcctacaccaagcagaaagcgacagggatgaagtacaacttgccttcctggtgtgaccgagtcctctggaagtcttatcccctggtgcacgtggtgtgtcagtcttatggcagtaccagcgacatcatgacgagtgaccacagccctgtctttgccacatttgaggcaggagtcacttcccagtttgtctccaagaacggtcccgggactgttgacagccaaggacagattgagtttctcaggtgctatgccacattgaagaccaagtcccagaccaaattctacctggagttccactcgagctgcttggagagttttgtcaagagtcaggaaggagaaaatgaagaaggaagtgagggggagctggtggtgaagtttggtgagactcttccaaagctgaagcccattatctctgaccctgagtacctgctagaccagcacatcctcatcagcatcaagtcctctgacagcgacgaatcctatggcgagggctgcattgcccttcggttagaggccacagaaacgcagctgcccatctacacgcctctcacccaccatggggagttgacaggccacttccagggggagatcaagctgcagacctctcagggcaagacgagggagaagctctatgactttgtgaagacggagcgtgatgaatccagtgggccaaagaccctgaagagcctcaccagccacgaccccatgaagcagtgggaagtcactagcagggcccctccgtgcagtggctccagcatcactgaaatcatcaaccccaactacatgggagtggggccctttgggccaccaatgcccctgcacgtgaagcagaccttgtcccctgaccagcagcccacagcctggagctacgaccagccgcccaaggactccccgctggggccctgcaggggagaaagtcctccgacacctcccggccagccgcccatatcacccaagaagtttttaccctcaacagcaaaccggggtctccctcccaggacacaggagtcaaggcccagtgacctggggaagaacgcaggggacacgctgcctcaggaggacctgccgctgacgaagcccgagatgtttgagaaccccctgtatgggtccctgagttccttccctaagcctgctcccaggaaggaccaggaatcccccaaaatgccgcggaaggaacccccgccctgcccggaacccggcatcttgtcgcccagcatcgtgctcaccaaagcccaggaggctgatcgcggcgaggggcccggcaagcaggtgcccgcgccccggctgcgctccttcacgtgctcatcctctgccgagggcagggcggccggcggggacaagagccaagggaagcccaagaccccggtcagctcccaggccccggtgccggccaagaggcccatcaagccttccagatcggaaatcaaccagcagaccccgcccaccccgacgccgcggccgccgctgccagtcaagagcccggcggtgctgcacctccagcactccaagggccgcgactaccgcgacaacaccgagctcccgcatcacggcaagcaccggccggaggaggggccaccagggcctctaggcaggactgccatgcagtgaagccctcagtgagctgccactgagtcgggagcccagaggaacggcgtgaagccactggaccctctcccgggacctcctgctggctcctcctgcccagcttcctatgcaaggctttgtgttttcaggaaagggcctagcttctgtgtggcccacagagttcactgcctgtgagacttagcaccaagtgctgaggctggaagaaaaacgcacaccagacgggcaacaaacagtctgggtccccagctcgctcttggtacttgggaccccagtgcctcgttgagggcgccattctgaagaaaggaactgcagcgccgatttgagggtggagatatagataataataatattaataataataatggccacatggatcgaacactcatgatgtgccaagtgctgtgctaagtgctttacgaacattcgtcatatcaggatgacctcgagagctgaggctctagccacctaaaaccacgtgcccaaacccaccagtttaaaacggtgtgtgttcggaggggtgaaagcattaagaagcccagtgccctcctggagtgagacaagggctcggccttaaggagctgaagagtctgggtagcttgtttagggtacaagaagcctgttctgtccagcttcagtgacacaagctgctttagctaaagtcccgcgggttccggcatggctaggctgagagcagggatctacctggcttctcagttctttggttggaaggagcaggaaatcagctcctattctccagtggagagatctggcctcagcttgggctagagatgccaaggcctgtgccaggttccctgtgccctcctcgaggtgggcagccatcaccagccacagttaagccaagccccccaacatgtattccatcgtgctggtagaagagtctttgctgttgctcccgaaagccgtgctctccagcctggctgccagggagggtgggcctcttggttccaggctcttgaaatagtgcagccttttcttcctatctctgtggctttcagctctgcttccttggttattaggagaatagatgggtgatgtctttccttatgttgctttttcaacatagcagaattaatgtagggagctaaatccagtggtgtgtgtgaatgcagaagggaatgcaccccacattcccatgatggaagtctgcgtaaccaataaattgtgcctttctcactcaaaaaaaaaaaaaaaaaa

SEQ ID NO: 135 - DNA, 9023 bp, Homo sapiens
gagaaggacgcgcggcccccagcgcctcttgggtggccgcctcggagcatgacccccgcgggccagcgccgcgcgctctgatccgaggagaccccgcgctcccgcagccatggccaccgggggccggcggggggcggcggccgcgccgctgctggtggcggtggccgcgctgctactgggcgccgcgggccacctgtaccccggagaggtgtgtcccggcatggatatccggaacaacctcactaggttgcatgagctggagaattgctctgtcatcgaaggacacttgcagatactcttgatgttcaaaacgaggcccgaagatttccgagacctcagtttccccaaactcatcatgatcactgattacttgctgctcttccgggtctatgggctcgagagcctgaaggacctgttccccaacctcacggtcatccggggatcacgactgttctttaactacgcgctggtcatcttcgagatggttcacctcaaggaactcggcctctacaacctgatgaacatcacccggggttctgtccgcatcgagaagaacaatgagctctgttacttggccactatcgactggtcccgtatcctggattccgtggaggataattacatcgtgttgaacaaagatgacaacgaggagtgtggagacatctgtccgggtaccgcgaagggcaagaccaactgccccgccaccgtcatcaacgggcagtttgtcgaacgatgttggactcatagtcactgccagaaagtttgcccgaccatctgtaagtcacacggctgcaccgccgaaggcctctgttgccacagcgagtgcctgggcaactgttctcagcccgacgaccccaccaagtgcgtggcctgccgcaacttctacctggacggcaggtgtgtggagacctgcccgcccccgtactaccacttccaggactggcgctgtgtgaacttcagcttctgccaggacctgcaccacaaatgcaagaactcgcggaggcagggctgccaccagtacgtcattcacaacaacaagtgcatccctgagtgtccctccgggtacacgatgaattccagcaacttgctgtgcaccccatgcctgggtccctgtcccaaggtgtgccacctcctagaaggcgagaagaccatcgactcggtgacgtctgcccaggagctccgaggatgcaccgtcatcaacgggagtctgatcatcaacattcgaggaggcaacaatctggcagctgagctagaagccaacctcggcctcattgaagaaatttcagggtatctaaaaatccgccgatcctacgctctggtgtcactttccttcttccggaagttacgtctgattcgaggagagaccttggaaattgggaactactccttctatgccttggacaaccagaacctaaggcagctctgggactggagcaaacacaacctcaccatcactcaggggaaactcttcttccactataaccccaaactctgcttgtcagaaatccacaagatggaagaagtttcaggaaccaaggggcgccaggagagaaacgacattgccctgaagaccaatggggaccaggcatcctgtgaaaatgagttacttaaattttcttacattcggacatcttttgacaagatcttgctgagatgggagccgtactggccccccgacttccgagacctcttggggttcatgctgttctacaaagaggccccttatcagaatgtgacggagttcgacgggcaggatgcgtgtggttccaacagttggacggtggtagacattgacccacccctgaggtccaacgaccccaaatcacagaaccacccagggtggctgatgcggggtctcaagccctggacccagtatgccatctttgtgaagaccctggtcaccttttcggatgaacgccggacctatggggccaagagtgacatcatttatgtccagacagatgccaccaacccctctgtgcccctggatccaatctcagtgtctaactcatcatcccagattattctgaagtggaaaccaccctccgaccccaatggcaacatcacccactacctggttttctgggagaggcaggcggaagacagtgagctgttcgagctggattattgcctcaaagggctgaagctgccctcgaggacctggtctccaccattcgagtctgaagattctcagaagcacaaccagagtgagtatgaggattcggccggcgaatgctgctcctgtccaaagacagactctcagatcctgaaggagctggaggagtcctcgtttaggaagacgtttgaggattacctgcacaacgtggttttcgtccccaggccatctcggaaacgcaggtcccttggcgatgttgggaatgtgacggtggccgtgcccacggtggcagctttccccaacacttcctcgaccagcgtgcccacgagtccggaggagcacaggccttttgagaaggtggtgaacaaggagtcgctggtcatctccggcttgcgacacttcacgggctatcgcatcgagctgcaggcttgcaaccaggacacccctgaggaacggtgcagtgtggcagcctacgtcagtgcgaggaccatgcctgaagccaaggctgatgacattgttggccctgtgacgcatgaaatctttgagaacaacgtcgtccacttgatgtggcaggagccgaaggagcccaatggtctgatcgtgctgtatgaagtgagttatcggcgatatggtgatgaggagctgcatctctgcgtctcccgcaagcacttcgctctggaacggggctgcaggctgcgtgggctgtcaccggggaactacagcgtgcgaatccgggccacctcccttgcgggcaacggctcttggacggaacccacctatttctacgtgacagactatttagacgtcccgtcaaatattgcaaaaattatcatcggccccctcatctttgtctttctcttcagtgttgtgattggaagtatttatctattcctgagaaagaggcagccagatgggccgctgggaccgctttacgcttcttcaaaccctgagtatctcagtgccagtgatgtgtttccatgctctgtgtacgtgccggacgagtgggaggtgtctcgagagaagatcaccctccttcgagagctggggcagggctccttcggcatggtgtatgagggcaatgccagggacatcatcaagggtgaggcagagacccgcgtggcggtgaagacggtcaacgagtcagccagtctccgagagcggattgagttcctcaatgaggcctcggtcatgaagggcttcacctgccatcacgtggtgcgcctcctgggagtggtgtccaagggccagcccacgctggtggtgatggagctgatggctcacggagacctgaagagctacctccgttctctgcggccagaggctgagaataatcctggccgccctccccctacccttcaagagatgattcagatggcggcagagattgctgacgggatggcctacctgaacgccaagaagtttgtgcatcgggacctggcagcgagaaactgcatggtcgcccatgattttactgtcaaaattggagactttggaatgaccagagacatctatgaaacggattactaccggaaagggggcaagggtctgctccctgtacggtggatggcaccggagtccctgaaggatggggtcttcaccacttcttctgacatgtggtcctttggcgtggtcctttgggaaatcaccagcttggcagaacagccttaccaaggcctgtctaatgaacaggtgttgaaatttgtcatggatggagggtatctggatcaacccgacaactgtccagagagagtcactgacctcatgcgcatgtgctggcaattcaaccccaagatgaggccaaccttcctggagattgtcaacctgctcaaggacgacctgcaccccagctttccagaggtgtcgttcttccacagcgaggagaacaaggctcccgagagtgaggagctggagatggagtttgaggacatggagaatgtgcccctggaccgttcctcgcactgtcagagggaggaggcggggggccgggatggagggtcctcgctgggtttcaagcggagctacgaggaacacatcccttacacacacatgaacggaggcaagaaaaacgggcggattctgaccttgcctcggtccaatccttcctaacagtgcctaccgtggcgggggcgggcaggggttcccattttcgctttcctctggtttgaaagcctctggaaaactcaggattctcacgactctaccatgtccaatggagttcagagatcgttcctatacatttctgttcatcttaaggtggactcgtttggttaccaatttaactagtcctgcagaggatttaactgtgaacctggagggcaaggggtttccacagttgctgctcctttggggcaacgacggtttcaaaccaggattttgtgttttttcgttccccccacccgcccccagcagatggaaagaaagcacctgtttttacaaattctttttttttttttttttttttgctggtgtctgagcttcagtataaaagacaaaacttcctgtttgtggaacaaaagttcgaaagaaaaaacaaaacaaaaacacccagccctgttccaggagaatttcaagttttacaggttgagcttcaagatggtttttttggttttttttttttctctcatccaggctgaaggattttttttttctttacaaaatgagttcctcaaattgaccaatagctgctgctttcatattttggataagggtctgtggtcccggcgtgtgctcacgtgtgtatgcacgtgtgtgtgtccattagacacggctgatgtgtgtgcaaagtatccatgcggagttgatgctttgggaattggctcatgaaggttcttctcaagggtgcgagctcatccccctctctccttccttcttattgactgggagactgtgctctcgacagattcttcttgtgtcagaagtctagcctcaggtttctaccctcccttcacattggtggccaagggaggagcatttcatttggagtgattatgaatcttttcaagaccaaaccaagctaggacattaaaaaaaaaaaaagaaaaagaaagaaaaaacaaaatggaaaaaggaaaaaaaaaaagaactgagatgacagagttttgagaatatatttgtaccatatttaatttttaaagtctctggtattagcctcataagttattgactattccccggggttggcggggagtggggacatgagttggtctgcctgttgtggggccgggaaggggagggagtcaggcacaagtggcctctttgtttggtcttaaaggcatccatttctgggaatgaagccatgttcgctgctaacacttttggatgttgtgaggccacgtggagtgtgtgagagactaggttttatggatggtctggttcaggtaccaggtctgctggaaggttcctgttcggataagctggtagctacctagctctgagcctgccttcaagaacacctgtgttcatcctctgattctctgtgtgtacctcttgtggcgtttcctctcccgggtgtgaacatcctaaccgttattgtgcaaacccaagaacgtcagatcccaaagcacaacaacctggatggactttgggaacatctaagcaatgtaagagagaggtgcactgagagtacgtcttggtcccctccaccctgagagcatctgacggtcctcagtactgaactcccggaagctgctctgagcccggtgacctcatctgggccaggtgtggtgcctgagctgaatgctcaggtgcttacagtgttgcaatccctaagagagtagagtctggaggagaaaccgtgaaaaagaccttacacaccaccaagaacttccgaatgggcgtgaatccaccgtttcttctctttgcaaaaagaaccaccacagctgctcaaagaacacagtgaactcatcactttggttcatcaaaaaatcatcgcccatgcgttattcctgagtgcattttcttacaactttttgactgcttccttttcttcttctcttaagagttgtgggcttaagaatgggatagagtcataatggcaacctccaagccctctcaattcttgattaagaacacaggtagacatgaatcccaattgtctattgctatcttatttatatgattcgggaaaatacagcatgtaaaaatattgctgaggagcctcagtgattgggtacaagaagcaagagtacagaaattatttttgccaaatttattttgtaaatatgagggtctgtacctaaatttaaaaaaaaaacacgtagaactaggtattttgttctcttcttagtaaatttgtagtggttgtatactacactagctgcaattttcacatttttctaattcagaaaggtttttcttatattaggggaaaaagtatttattttaatatataaaatcactctgaaaatcactctcataaaaaatggagcgcatgtaaatttttatcaaagaaaaataaacaggtgaatgggggatagtgattttcttttttcagcacagtctacctcagtgtattgttaagatgtgattcaatcatggacatctttgagatttcagaattctacctggaaccggtctgaatcagggaacgtgtgtatcagctgattcgaatgccagggaccagtaagaattttgagggagggagttgggatggagaaggtatggcctttatgcgagcatagatccttttcttcctggctggtaatattcttctctgaatttaatcttcctttaaaaaaaaatcctccatctattgtcactatgttccccaaacataaactaagttccaggctgtcatgatgtatctgatatatggggtaacccagcaaggtgtaccttcctttggtgagagatggctgccggggcaaagacgggctttgattcagagcaagcattcccacctgttccatggaatccccctgaagtgagcacaaaggtgccctgggctccctgatggtttatgcccactcctttcaggctggtgatgcaccttacacacaaacacctaatgcaatgtctttttaaattctccaagtgggatgggagcatgtgagggaaattccaatccaaaacccattaatgtgctgaacgctttttttttttttttttttttttttgcaacaacaccttggacctctgtgttggggtttgactgacctcaagctgatattattggaccttgtgcagctttgataacccatgtgagagtctaggcaggaccagtggggcccaaatcttgctgctcttgtacttttaggcactgcccttgcagactcacctttctccacctgccctggagaaaggtagggtgtgctgggcctgccccttgcaaatgggattcaccagtttcatttatttgactctactgccacagtgaaaagagcaaacagctattgggttgcaaacctcctttgacattaggaaatgttgactttgtaacaataaaactttggtcctagaaagacacggttgtcctgggagtttgtagtgttaagttgcaacaacaacaacaaaaagcaacaaaaccagcttaggataacactttttgttgcttgttcttaaagatgtctcactatgattaaaacccttttcattaatgtagtgaaagccacacaggagttccttcttccaggaggagaataccaagcacatcactttctctctgcatcagtgatgtcaaatacgcatcagaaaatgttcaggttttaggagctgtcctaggtgctgtttcatcattggaagcagtgagaaagagaagcactgctgcttgtctggatataggctgaggatgattgagagaagctgtgggaactgacacaagggtctgcataggtcatcctgtgaccctggggactatgttaccaactgacagacagatctttcactgtatcctagcagggcaggtagtccaccaagaaatgtgcttattggattgggaggtgtttatttgtagtctgctgtaacacgtgtgaaagagcaggagcgtcatcagcatatgacttgcgctggtcatccggtaaatggatgtgctgtagtcccagtgctaatcatttctctccttcacagtgggtggaagtttagggttaaatgtcctttgaatgtcacctggtgagtccttgacaccttaggctcttcagaaacaatggttttgttgaggatggggaacagggaatgccgattttatatacatggtacacagagaggggtgtcacttcagaaaatcttccagcatgttcttcagaatattaatttatatgcgaggtgaggttgggaatgaaaagaacaggtcagcacttttttttttcctagaacatacaaaagaacatggtggactttcagggagtgcaatggaaggtgaatatttccttaagggtccccgagaaatgggagtgaggggaggggacacaatggctttttgagcttacttttaccttctgatactagtcaaggtccagaaccagccaccagccaaatttctatctgggtgcgggccactgaaaatccttgttaaaaaccagatcacaaatctggggctcttggtcccattggagaaggaaggaagagcctcaaaataagtgtgcacccatgcacatattcaggaacagcttgtttagtctttacactttgcctgaaagttgcttctcctcgtccctttgtgtgcctgggtggcctcggccctgtgcgttggcaacgcaggatcaaatgtgctgcagcttttgcagaaaacaactcagaaacacaaaaccccccaacagctcaattattattttttcaatgttttcctacaagagccaagtagcaccatgtacagaagacgcctttttttttggaatattgaaatcgttctgcatgtaaaatatgggataatgacctgtttatattaaaattctgattaaattatctgagaata

SEQ ID NO: 136 - DNA, 2963 bp, Homo sapiens
acaggcatccagggtgaggaaggctgcccacaggcatccagggtgaggaaggcagcccacacttttcttggagacacatccccaaagaagtcctcacgtggctccgtttgggcagaaaccatgaattgaacgggaaaagaaatatgtcaagtatcagaaagaagagtggcatgctttgacagcaagtggactccgagtccagggcagagcctcagttagggacatgctgggcctgcgccccccactgctcgccctggtggggctgctctccctcgggtgcgtcctctctcaggagtgcacgaagttcaaggtcagcagctgccgggaatgcatcgagtcggggcccggctgcacctggtgccagaagctgaacttcacagggccgggggatcctgactccattcgctgcgacacccggccacagctgctcatgaggggctgtgcggctgacgacatcatggaccccacaagcctcgctgaaacccaggaagaccacaatgggggccagaagcagctgtccccacaaaaagtgacgctttacctgcgaccaggccaggcagcagcgttcaacgtgaccttccggcgggccaagggctaccccatcgacctgtactatctgatggacctctcctactccatgcttgatgacctcaggaatgtcaagaagctaggtggcgacctgctccgggccctcaacgagatcaccgagtccggccgcattggcttcgggtccttcgtggacaagaccgtgctgccgttcgtgaacacgcaccctgataagctgcgaaacccatgccccaacaaggagaaagagtgccagcccccgtttgccttcaggcacgtgctgaagctgaccaacaactccaaccagtttcagaccgaggtcgggaagcagctgatttccggaaacctggatgcacccgagggtgggctggacgccatgatgcaggtcgccgcctgcccggaggaaatcggctggcgcaacgtcacgcggctgctggtgtttgccactgatgacggcttccatttcgcgggcgacgggaagctgggcgccatcctgacccccaacgacggccgctgtcacctggaggacaacttgtacaagaggagcaacgaattcgactacccatcggtgggccagctggcgcacaagctggctgaaaacaacatccagcccatcttcgcggtgaccagtaggatggtgaagacctacgagaaactcaccgagatcatccccaagtcagccgtgggggagctgtctgaggactccagcaatgtggtccatctcattaagaatgcttacaataaactctcctccagggtcttcctggatcacaacgccctccccgacaccctgaaagtcacctacgactccttctgcagcaatggagtgacgcacaggaaccagcccagaggtgactgtgatggcgtgcagatcaatgtcccgatcaccttccaggtgaaggtcacggccacagagtgcatccaggagcagtcgtttgtcatccgggcgctgggcttcacggacatagtgaccgtgcaggttcttccccagtgtgagtgccggtgccgggaccagagcagagaccgcagcctctgccatggcaagggcttcttggagtgcggcatctgcaggtgtgacactggctacattgggaaaaactgtgagtgccagacacagggccggagcagccaggagctggaaggaagctgccggaaggacaacaactccatcatctgctcagggctgggggactgtgtctgcgggcagtgcctgtgccacaccagcgacgtccccggcaagctgatatacgggcagtactgcgagtgtgacaccatcaactgtgagcgctacaacggccaggtctgcggcggcccggggagggggctctgcttctgcgggaagtgccgctgccacccgggctttgagggctcagcgtgccagtgcgagaggaccactgagggctgcctgaacccgcggcgtgttgagtgtagtggtcgtggccggtgccgctgcaacgtatgcgagtgccattcaggctaccagctgcctctgtgccaggagtgccccggctgcccctcaccctgtggcaagtacatctcctgcgccgagtgcctgaagttcgaaaagggcccctttgggaagaactgcagcgcggcgtgtccgggcctgcagctgtcgaacaaccccgtgaagggcaggacctgcaaggagagggactcagagggctgctgggtggcctacacgctggagcagcaggacgggatggaccgctacctcatctatgtggatgagagccgagagtgtgtggcaggccccaacatcgccgccatcgtcgggggcaccgtggcaggcatcgtgctgatcggcattctcctgctggtcatctggaaggctctgatccacctgagcgacctccgggagtacaggcgctttgagaaggagaagctcaagtcccagtggaacaatgataatccccttttcaagagcgccaccacgacggtcatgaaccccaagtttgctgagagttaggagcacttggtgaagacaaggccgtcaggacccaccatgtctgccccatcacgcggccgagacatggcttgccacagctcttgaggatgtcaccaattaaccagaaatccagttattttccgccctcaaaatgacagccatggccggccgggtgcttctgggggctcgtcggggggacagctccactctgactggcacagtctttgcatggagacttgaggagggagggcttgaggttggtgaggttaggtgcgtgtttcctgtgcaagtcaggacatcagtctgattaaaggtggtgccaatttatttacatttaaacttgtcagggtataaaatgacatcccattaattatattgttaatcaatcacgtgtatagaaaaaaaataaaacttcaatacaggctgtccatggaaaaaaaaaaaaaaaaaa

SEQ ID NO: 137 - DNA, 2928 bp, Homo sapiens
gaggagctgagaggaacaggaagtgtcaggactttacgacccgcgcctccagctgaggtttctagacgtgacccagggcagactggtagcaaagcccccacgcccagccaggagcaccgccgaggactccagcacaccgagggacatgctgggcctgcgccccccactgctcgccctggtggggctgctctccctcgggtgcgggcggcccagagcacccactcaccagccggcctcgtccctcagtcctctctcaggagtgcacgaagttcaaggtcagcagctgccgggaatgcatcgagtcggggcccggctgcacctggtgccagaagctgaacttcacagggccgggggatcctgactccattcgctgcgacacccggccacagctgctcatgaggggctgtgcggctgacgacatcatggaccccacaagcctcgctgaaacccaggaagaccacaatgggggccagaagcagctgtccccacaaaaagtgacgctttacctgcgaccaggccaggcagcagcgttcaacgtgaccttccggcgggccaagggctaccccatcgacctgtactatctgatggacctctcctactccatgcttgatgacctcaggaatgtcaagaagctaggtggcgacctgctccgggccctcaacgagatcaccgagtccggccgcattggcttcgggtccttcgtggacaagaccgtgctgccgttcgtgaacacgcaccctgataagctgcgaaacccatgccccaacaaggagaaagagtgccagcccccgtttgccttcaggcacgtgctgaagctgaccaacaactccaaccagtttcagaccgaggtcgggaagcagctgatttccggaaacctggatgcacccgagggtgggctggacgccatgatgcaggtcgccgcctgcccggaggaaatcggctggcgcaacgtcacgcggctgctggtgtttgccactgatgacggcttccatttcgcgggcgacgggaagctgggcgccatcctgacccccaacgacggccgctgtcacctggaggacaacttgtacaagaggagcaacgaattcgactacccatcggtgggccagctggcgcacaagctggctgaaaacaacatccagcccatcttcgcggtgaccagtaggatggtgaagacctacgagaaactcaccgagatcatccccaagtcagccgtgggggagctgtctgaggactccagcaatgtggtccatctcattaagaatgcttacaataaactctcctccagggtcttcctggatcacaacgccctccccgacaccctgaaagtcacctacgactccttctgcagcaatggagtgacgcacaggaaccagcccagaggtgactgtgatggcgtgcagatcaatgtcccgatcaccttccaggtgaaggtcacggccacagagtgcatccaggagcagtcgtttgtcatccgggcgctgggcttcacggacatagtgaccgtgcaggttcttccccagtgtgagtgccggtgccgggaccagagcagagaccgcagcctctgccatggcaagggcttcttggagtgcggcatctgcaggtgtgacactggctacattgggaaaaactgtgagtgccagacacagggccggagcagccaggagctggaaggaagctgccggaaggacaacaactccatcatctgctcagggctgggggactgtgtctgcgggcagtgcctgtgccacaccagcgacgtccccggcaagctgatatacgggcagtactgcgagtgtgacaccatcaactgtgagcgctacaacggccaggtctgcggcggcccggggagggggctctgcttctgcgggaagtgccgctgccacccgggctttgagggctcagcgtgccagtgcgagaggaccactgagggctgcctgaacccgcggcgtgttgagtgtagtggtcgtggccggtgccgctgcaacgtatgcgagtgccattcaggctaccagctgcctctgtgccaggagtgccccggctgcccctcaccctgtggcaagtacatctcctgcgccgagtgcctgaagttcgaaaagggcccctttgggaagaactgcagcgcggcgtgtccgggcctgcagctgtcgaacaaccccgtgaagggcaggacctgcaaggagagggactcagagggctgctgggtggcctacacgctggagcagcaggacgggatggaccgctacctcatctatgtggatgagagccgagagtgtgtggcaggccccaacatcgccgccatcgtcgggggcaccgtggcaggcatcgtgctgatcggcattctcctgctggtcatctggaaggctctgatccacctgagcgacctccgggagtacaggcgctttgagaaggagaagctcaagtcccagtggaacaatgataatccccttttcaagagcgccaccacgacggtcatgaaccccaagtttgctgagagttaggagcacttggtgaagacaaggccgtcaggacccaccatgtctgccccatcacgcggccgagacatggcttgccacagctcttgaggatgtcaccaattaaccagaaatccagttattttccgccctcaaaatgacagccatggccggccgggtgcttctgggggctcgtcggggggacagctccactctgactggcacagtctttgcatggagacttgaggagggagggcttgaggttggtgaggttaggtgcgtgtttcctgtgcaagtcaggacatcagtctgattaaaggtggtgccaatttatttacatttaaacttgtcagggtataaaatgacatcccattaattatattgttaatcaatcacgtgtatagaaaaaaaataaaacttcaatacaggctgtccatggaaaaaaaaaaaaaaaaaa

SEQ ID NO: 138 - DNA, 4721 bp, Homo sapiens
gaagccgcccgtttcctgccgagcggcgcgacggcacctgagcgactgcggcggcggcggcggcggcggcggcgcctcggagcgggcggcccgggctgtagtgccggcgccgccgcgtcttcccggtctcctttcccggccgcacagggtagattttcgttccgtcacccaggctggagtgcagtggtgtgaccttggcttgctgcaaccctttgcctcctgggttcaagtgattctcattgcctcagcctcctaagtagctgggattacaggttttataggatcacattgacaaaagtaccatggagttttatgagtcagcatattttattgttcttattccttcaatagttattacagtaattttcctcttcttctggcttttcatgaaagaaacattatatgatgaagttcttgcaaaacagaaaagagaacaaaagcttattcctaccaaaacagataaaaagaaagcagaaaagaaaaagaataaaaagaaagaaatccagaatggaaacctccatgaatccgactctgagagtgtacctcgagactttaaattatcagatgctttggcagtagaagatgatcaagttgcacctgttccattgaatgtcgttgaaacttcaagtagtgttagggaaagaaaaaagaaggaaaagaaacaaaagcctgtgcttgaagagcaggtcatcaaagaaagtgacgcatcaaagattcctggcaaaaaagtagaacctgtcccagttactaaacagcccacccctccctctgaagcagctgcctcgaagaagaaaccagggcagaagaagtctaaaaatggaagcgatgaccaggataaaaaggtggaaactctcatggtaccatcaaaaaggcaagaagcattgcccctccaccaagagactaaacaagaaagtggatcagggaagaagaaagcttcatcaaagaaacaaaagacagaaaatgtcttcgtagatgaaccccttattcatgcaactacttatattcctttgatggataatgctgactcaagtcctgtggtagataagagagaggttattgatttgcttaaacctgaccaagtagaagggatccagaaatctgggactaaaaaactgaagaccgaaactgacaaagaaaatgctgaagtgaagtttaaagattttcttctgtccttgaagactatgatgttttctgaagatgaggctctttgtgttgtagacttgctaaaggagaagtctggtgtaatacaagatgctttaaagaagtcaagtaagggagaattgactacgcttatacatcagcttcaagaaaaggacaagttactcgctgctgtgaaggaagatgctgctgctacaaaggatcggtgtaagcagttaacccaggaaatgatgacagagaaagaaagaagcaatgtggttataacaaggatgaaagatcgaattggaacattagaaaaggaacataatgtatttcaaaacaaaatacatgtcagttatcaagagactcaacagatgcagatgaagtttcagcaagttcgtgagcagatggaggcagagatagctcacttgaagcaggaaaatggtatactgagagatgcagtcagcaacactacaaatcaactggaaagcaagcagtctgcagaactaaataaactacgccaggattatgctaggttggtgaatgagctgactgagaaaacaggaaagctacagcaagaggaagtccaaaagaagaatgctgagcaagcagctactcagttgaaggttcaactacaagaagctgagagaaggtgggaagaagttcagagctacatcaggaagagaacagcggaacatgaggcagcacagcaagatttacagagtaaatttgtggccaaagaaaatgaagtacagagtctgcatagtaagcttacagataccttggtatcaaaacaacagttggagcaaagactaatgcagttaatggaatcagagcagaaaagggtgaacaaagaagagtctctacaaatgcaggttcaggatattttggagcagaatgaggctttgaaagctcaaattcagcagttccattcccagatagcagcccagacctccgcttcagttctagcagaagaattacataaagtgattgcagaaaaggataagcagataaaacagactgaagattctttagcaagtgaacgtgatcgtttaacaagtaaagaagaggaacttaaggatatacagaatatgaatttcttattaaaagctgaagtgcagaaattacaggccctggcaaatgagcaggctgctgctgcacatgaattggagaagatgcaacaaagtgtttatgttaaagatgataaaataagattgctggaagagcaactacaacatgaaatttcaaacaaaatggaagaatttaagattctaaatgaccaaaacaaagcattaaaatcagaagttcagaagctacagactcttgtttctgaacagcctaataaggatgttgtggaacaaatggaaaaatgcattcaagaaaaagatgagaagttaaagactgtggaagaattacttgaaactggacttattcaggtggcaactaaagaagaggagctgaatgcaataagaacagaaaattcatctctgacaaaagaagttcaagacttaaaagctaagcaaaatgatcaggtttcttttgcctctctagttgaagaacttaagaaagtgatccatgagaaagatggaaagatcaagtctgtagaagagcttctggaggcagaacttctcaaagttgctaacaaggagaaaactgttcagttatctatcacttccaaagttcaggagcttcagaacttattaaaaggaaaagaggaacagatgaataccatgaaggctgttttggaagagaaagagaaagacctagccaatacagggaagtggttacaggatcttcaagaagaaaatgaatctttaaaagcacatgttcaggaagtagcacaacataacttgaaagaggcctcttctgcatcacagtttgaagaacttgagattgtgttgaaagaaaaggaaaatgaattgaagaggttagaagccatgctaaaagagagggagagtgatctttctagcaaaacacagctgttacaggatgtacaagatgaaaacaaattgtttaagtcccaaattgagcagcttaaacaacaaaactaccaacaggcatcttcttttccccctcatgaagaattattaaaagtaatttcagaaagagagaaagaaataagtggtctctggaatgagttagattctttgaaggatgcagttgaacaccagaggaagaaaaacaatgaccttcgggagaaaaactgggaagcaatggaagcattggcatcaactgaaaaaatgctgcaggacaaagtgaacaagacttccaaggaaaggcagcaacaggtggaagctgttgagttggaggctaaagaagttctcaaaaaattatttccaaaggtgtctgtcccttctaatttgagttatggtgaatggttgcatggatttgaaaaaaaggcaaaagaatgtatggctggaacttcagggtcagaggaggttaaggttctagagcacaagttgaaagaagctgatgaaatgcacacattgttacagctagagtgtgaaaaatacaaatccgtccttgcagaaacagaaggaattttacagaagctacagagaagtgttgagcaagaagaaaataaatggaaagttaaggtcgatgaatcacacaagactattaaacagatgcagtcatcatttacatcttcagaacaagagctagagcgattaagaagcgaaaataaggatattgaaaatctgagaagagaacgagaacatttggaaatggaactagaaaaggcagagatggaacgatctacctatgttacagaagtcagagagttgaaggcacagttaaatgaaacactcacaaaacttagaactgaacaaaatgaaagacagaaggtagctggtgatttgcataaggctcaacagtcactggagcttatccagtcaaaaatagtaaaagctgctggagacactactgttattgaaaatagtgatgtttccccagaaacggagtcttctgagaaggagacaatgtctgtaagtctaaatcagactgtaacacagttacagcagttgcttcaggcggtaaaccaacagctcacaaaggagaaagagcactaccaggtgttagagtgaagtaattgggaaactgttcatttgaggataaaaaaggcattgtattatattttgccaaattaaagccttatttatgttttcaccctttctactttgtcagaaacactgaacagagttttgtcttttctaatccttgttagactactgatttaaagaaggaaaaaaaaaagccaactctgtagacaccttcagagtttagttttataataaaaactgtttgaataattagacctttacattcctgaagataaacatgtaatcttttatcttattttgctcaataaaattgttcagaagatcaaagtggtaaagacaatgtaaaatttaacattttaatactgatgttgtacactgttttacttaacattttgggaagtaactgcctctgacttcaactcaagaaaacacttttttgttgctaatgtaatcggtttttgtaatggcgtcagcaaataaaaggatgcttattattcaaacttgaaaaaaaaaaaaaaaaaa

SEQ ID NO: 139 - DNA, 4790 bp, Homo sapiens
gaagccgcccgtttcctgccgagcggcgcgacggcacctgagcgactgcggcggcggcggcggcggcggcggcgcctcggagcgggcggcccgggctgtagtgccggcgccgccgcgtcttcccggtctcctttcccggccgcacagggtagattttcgttccgtcacccaggctggagtgcagtggtgtgaccttggcttgctgcaaccctttgcctcctgggttcaagtgattctcattgcctcagcctcctaagtagctgggattacaggttttataggatcacattgacaaaagtaccatggagttttatgagtcagcatattttattgttcttattccttcaatagttattacagtaattttcctcttcttctggcttttcatgaaagaaacattatatgatgaagttcttgcaaaacagaaaagagaacaaaagcttattcctaccaaaacagataaaaagaaagcagaaaagaaaaagaataaaaagaaagaaatccagaatggaaacctccatgaatccgactctgagagtgtacctcgagactttaaattatcagatgctttggcagtagaagatgatcaagttgcacctgttccattgaatgtcgttgaaacttcaagtagtgttagggaaagaaaaaagaaggaaaagaaacaaaagcctgtgcttgaagagcaggtcatcaaagaaagtgacgcatcaaagattcctggcaaaaaagtagaacctgtcccagttactaaacagcccacccctccctctgaagcagctgcctcgaagaagaaaccagggcagaagaagtctaaaaatggaagcgatgaccaggataaaaaggtggaaactctcatggtaccatcaaaaaggcaagaagcattgcccctccaccaagagactaaacaagaaagtggatcagggaagaagaaagcttcatcaaagaaacaaaagacagaaaatgtcttcgtagatgaaccccttattcatgcaactacttatattcctttgatggataatgctgactcaagtcctgtggtagataagagagaggttattgatttgcttaaacctgaccaagtagaagggatccagaaatctgggactaaaaaactgaagaccgaaactgacaaagaaaatgctgaagtgaagtttaaagattttcttctgtccttgaagactatgatgttttctgaagatgaggctctttgtgttgtagacttgctaaaggagaagtctggtgtaatacaagatgctttaaagaagtcaagtaagggagaattgactacgcttatacatcagcttcaagaaaaggacaagttactcgctgctgtgaaggaagatgctgctgctacaaaggatcggtgtaagcagttaacccaggaaatgatgacagagaaagaaagaagcaatgtggttataacaaggatgaaagatcgaattggaacattagaaaaggaacataatgtatttcaaaacaaaatacatgtcagttatcaagagactcaacagatgcagatgaagtttcagcaagttcgtgagcagatggaggcagagatagctcacttgaagcaggaaaatggtatactgagagatgcagtcagcaacactacaaatcaactggaaagcaagcagtctgcagaactaaataaactacgccaggattatgctaggttggtgaatgagctgactgagaaaacaggaaagctacagcaagaggaagtccaaaagaagaatgctgagcaagcagctactcagttgaaggttcaactacaagaagctgagagaaggtgggaagaagttcagagctacatcaggaagagaacagcggaacatgaggcagcacagcaagatttacagagtaaatttgtggccaaagaaaatgaagtacagagtctgcatagtaagcttacagataccttggtatcaaaacaacagttggagcaaagactaatgcagttaatggaatcagagcagaaaagggtgaacaaagaagagtctctacaaatgcaggttcaggatattttggagcagaatgaggctttgaaagctcaaattcagcagttccattcccagatagcagcccagacctccgcttcagttctagcagaagaattacataaagtgattgcagaaaaggataagcagataaaacagactgaagattctttagcaagtgaacgtgatcgtttaacaagtaaagaagaggaacttaaggatatacagaatatgaatttcttattaaaagctgaagtgcagaaattacaggccctggcaaatgagcaggctgctgctgcacatgaattggagaagatgcaacaaagtgtttatgttaaagatgataaaataagattgctggaagagcaactacaacatgaaatttcaaacaaaatggaagaatttaagattctaaatgaccaaaacaaagcattaaaatcagaagttcagaagctacagactcttgtttctgaacagcctaataaggatgttgtggaacaaatggaaaaatgcattcaagaaaaagatgagaagttaaagactgtggaagaattacttgaaactggacttattcaggtggcaactaaagaagaggagctgaatgcaataagaacagaaaattcatctctgacaaaagaagttcaagacttaaaagctaagcaaaatgatcaggtttcttttgcctctctagttgaagaacttaagaaagtgatccatgagaaagatggaaagatcaagtctgtagaagagcttctggaggcagaacttctcaaagttgctaacaaggagaaaactgttcaggatttgaaacaggaaataaaggctctaaaagaagaaataggaaatgtccagcttgaaaaggctcaacagttatctatcacttccaaagttcaggagcttcagaacttattaaaaggaaaagaggaacagatgaataccatgaaggctgttttggaagagaaagagaaagacctagccaatacagggaagtggttacaggatcttcaagaagaaaatgaatctttaaaagcacatgttcaggaagtagcacaacataacttgaaagaggcctcttctgcatcacagtttgaagaacttgagattgtgttgaaagaaaaggaaaatgaattgaagaggttagaagccatgctaaaagagagggagagtgatctttctagcaaaacacagctgttacaggatgtacaagatgaaaacaaattgtttaagtcccaaattgagcagcttaaacaacaaaactaccaacaggcatcttcttttccccctcatgaagaattattaaaagtaatttcagaaagagagaaagaaataagtggtctctggaatgagttagattctttgaaggatgcagttgaacaccagaggaagaaaaacaatgaccttcgggagaaaaactgggaagcaatggaagcattggcatcaactgaaaaaatgctgcaggacaaagtgaacaagacttccaaggaaaggcagcaacaggtggaagctgttgagttggaggctaaagaagttctcaaaaaattatttccaaaggtgtctgtcccttctaatttgagttatggtgaatggttgcatggatttgaaaaaaaggcaaaagaatgtatggctggaacttcagggtcagaggaggttaaggttctagagcacaagttgaaagaagctgatgaaatgcacacattgttacagctagagtgtgaaaaatacaaatccgtccttgcagaaacagaaggaattttacagaagctacagagaagtgttgagcaagaagaaaataaatggaaagttaaggtcgatgaatcacacaagactattaaacagatgcagtcatcatttacatcttcagaacaagagctagagcgattaagaagcgaaaataaggatattgaaaatctgagaagagaacgagaacatttggaaatggaactagaaaaggcagagatggaacgatctacctatgttacagaagtcagagagttgaaggcacagttaaatgaaacactcacaaaacttagaactgaacaaaatgaaagacagaaggtagctggtgatttgcataaggctcaacagtcactggagcttatccagtcaaaaatagtaaaagctgctggagacactactgttattgaaaatagtgatgtttccccagaaacggagtcttctgagaaggagacaatgtctgtaagtctaaatcagactgtaacacagttacagcagttgcttcaggcggtaaaccaacagctcacaaaggagaaagagcactaccaggtgttagagtgaagtaattgggaaactgttcatttgaggataaaaaaggcattgtattatattttgccaaattaaagccttatttatgttttcaccctttctactttgtcagaaacactgaacagagttttgtcttttctaatccttgttagactactgatttaaagaaggaaaaaaaaaagccaactctgtagacaccttcagagtttagttttataataaaaactgtttgaataattagacctttacattcctgaagataaacatgtaatcttttatcttattttgctcaataaaattgttcagaagatcaaagtggtaaagacaatgtaaaatttaacattttaatactgatgttgtacactgttttacttaacattttgggaagtaactgcctctgacttcaactcaagaaaacacttttttgttgctaatgtaatcggtttttgtaatggcgtcagcaaataaaaggatgcttattattcaaacttgaaaaaaaaaaaaaaaaaa

SEQ ID NO: 140 - DNA, 4579 bp, Homo sapiens
gaagccgcccgtttcctgccgagcggcgcgacggcacctgagcgactgcggcggcggcggcggcggcggcggcgcctcggagcgggcggcccgggctgtagtgccggcgccgccgcgtcttcccggtctcctttcccggccgcacagggttttataggatcacattgacaaaagtaccatggagttttatgagtcagcatattttattgttcttattccttcaatagttattacagtaattttcctcttcttctggcttttcatgaaagaaacattatatgatgaagttcttgcaaaacagaaaagagaacaaaagcttattcctaccaaaacagataaaaagaaagcagaaaagaaaaagaataaaaagaaagaaatccagaatggaaacctccatgaatccgactctgagagtgtacctcgagactttaaattatcagatgctttggcagtagaagatgatcaagttgcacctgttccattgaatgtcgttgaaacttcaagtagtgttagggaaagaaaaaagaaggaaaagaaacaaaagcctgtgcttgaagagcaggtcatcaaagaaagtgacgcatcaaagattcctggcaaaaaagtagaacctgtcccagttactaaacagcccacccctccctctgaagcagctgcctcgaagaagaaaccagggcagaagaagtctaaaaatggaagcgatgaccaggataaaaaggtggaaactctcatggtaccatcaaaaaggcaagaagcattgcccctccaccaagagactaaacaagaaagtggatcagggaagaagaaagcttcatcaaagaaacaaaagacagaaaatgtcttcgtagatgaaccccttattcatgcaactacttatattcctttgatggataatgctgactcaagtcctgtggtagataagagagaggttattgatttgcttaaacctgaccaagtagaagggatccagaaatctgggactaaaaaactgaagaccgaaactgacaaagaaaatgctgaagtgaagtttaaagattttcttctgtccttgaagactatgatgttttctgaagatgaggctctttgtgttgtagacttgctaaaggagaagtctggtgtaatacaagatgctttaaagaagtcaagtaagggagaattgactacgcttatacatcagcttcaagaaaaggacaagttactcgctgctgtgaaggaagatgctgctgctacaaaggatcggtgtaagcagttaacccaggaaatgatgacagagaaagaaagaagcaatgtggttataacaaggatgaaagatcgaattggaacattagaaaaggaacataatgtatttcaaaacaaaatacatgtcagttatcaagagactcaacagatgcagatgaagtttcagcaagttcgtgagcagatggaggcagagatagctcacttgaagcaggaaaatggtatactgagagatgcagtcagcaacactacaaatcaactggaaagcaagcagtctgcagaactaaataaactacgccaggattatgctaggttggtgaatgagctgactgagaaaacaggaaagctacagcaagaggaagtccaaaagaagaatgctgagcaagcagctactcagttgaaggttcaactacaagaagctgagagaaggtgggaagaagttcagagctacatcaggaagagaacagcggaacatgaggcagcacagcaagatttacagagtaaatttgtggccaaagaaaatgaagtacagagtctgcatagtaagcttacagataccttggtatcaaaacaacagttggagcaaagactaatgcagttaatggaatcagagcagaaaagggtgaacaaagaagagtctctacaaatgcaggttcaggatattttggagcagaatgaggctttgaaagctcaaattcagcagttccattcccagatagcagcccagacctccgcttcagttctagcagaagaattacataaagtgattgcagaaaaggataagcagataaaacagactgaagattctttagcaagtgaacgtgatcgtttaacaagtaaagaagaggaacttaaggatatacagaatatgaatttcttattaaaagctgaagtgcagaaattacaggccctggcaaatgagcaggctgctgctgcacatgaattggagaagatgcaacaaagtgtttatgttaaagatgataaaataagattgctggaagagcaactacaacatgaaatttcaaacaaaatggaagaatttaagattctaaatgaccaaaacaaagcattaaaatcagaagttcagaagctacagactcttgtttctgaacagcctaataaggatgttgtggaacaaatggaaaaatgcattcaagaaaaagatgagaagttaaagactgtggaagaattacttgaaactggacttattcaggtggcaactaaagaagaggagctgaatgcaataagaacagaaaattcatctctgacaaaagaagttcaagacttaaaagctaagcaaaatgatcaggtttcttttgcctctctagttgaagaacttaagaaagtgatccatgagaaagatggaaagatcaagtctgtagaagagcttctggaggcagaacttctcaaagttgctaacaaggagaaaactgttcaggatttgaaacaggaaataaaggctctaaaagaagaaataggaaatgtccagcttgaaaaggctcaacagttatctatcacttccaaagttcaggagcttcagaacttattaaaaggaaaagaggaacagatgaataccatgaaggctgttttggaagagaaagagaaagacctagccaatacagggaagtggttacaggatcttcaagaagaaaatgaatctttaaaagcacatgttcaggaagtagcacaacataacttgaaagaggcctcttctgcatcacagtttgaagaacttgagattgtgttgaaagaaaaggaaaatgaattgaagaggttagaagccatgctaaaagagagggagagtgatctttctagcaaaacacagctgttacaggatgtacaagatgaaaacaaattgtttaagtcccaaattgagcagcttaaacaacaaaactaccaacaggcatcttcttttccccctcatgaagaattattaaaagtaatttcagaaagagagaaagaaataagtggtctctggaatgagttagattctttgaaggatgcagttgaacaccagaggaagaaaaacaatgaaaggcagcaacaggtggaagctgttgagttggaggctaaagaagttctcaaaaaattatttccaaaggtgtctgtcccttctaatttgagttatggtgaatggttgcatggatttgaaaaaaaggcaaaagaatgtatggctggaacttcagggtcagaggaggttaaggttctagagcacaagttgaaagaagctgatgaaatgcacacattgttacagctagagtgtgaaaaatacaaatccgtccttgcagaaacagaaggaattttacagaagctacagagaagtgttgagcaagaagaaaataaatggaaagttaaggtcgatgaatcacacaagactattaaacagatgcagtcatcatttacatcttcagaacaagagctagagcgattaagaagcgaaaataaggatattgaaaatctgagaagagaacgagaacatttggaaatggaactagaaaaggcagagatggaacgatctacctatgttacagaagtcagagagttgaaggcacagttaaatgaaacactcacaaaacttagaactgaacaaaatgaaagacagaaggtagctggtgatttgcataaggctcaacagtcactggagcttatccagtcaaaaatagtaaaagctgctggagacactactgttattgaaaatagtgatgtttccccagaaacggagtcttctgagaaggagacaatgtctgtaagtctaaatcagactgtaacacagttacagcagttgcttcaggcggtaaaccaacagctcacaaaggagaaagagcactaccaggtgttagagtgaagtaattgggaaactgttcatttgaggataaaaaaggcattgtattatattttgccaaattaaagccttatttatgttttcaccctttctactttgtcagaaacactgaacagagttttgtcttttctaatccttgttagactactgatttaaagaaggaaaaaaaaaagccaactctgtagacaccttcagagtttagttttataataaaaactgtttgaataattagacctttacattcctgaagataaacatgtaatcttttatcttattttgctcaataaaattgttcagaagatcaaagtggtaaagacaatgtaaaatttaacattttaatactgatgttgtacactgttttacttaacattttgggaagtaactgcctctgacttcaactcaagaaaacacttttttgttgctaatgtaatcggtttttgtaatggcgtcagcaaataaaaggatgcttattattcaaacttgaaaaaaaaaaaaaaaaaa

SEQ ID NO: 141 - DNA, 4777 bp, Homo sapiens
gaagccgcccgtttcctgccgagcggcgcgacggcacctgagcgactgcggcggcggcggcggcggcggcggcgcctcggagcgggcggcccgggctgtagtgccggcgccgccgcgtcttcccggtctcctttcccggccgcacagggtagattttcgttccgtcacccaggctggagtgcagtggtgtgaccttggcttgctgcaaccctttgcctcctgggttcaagtgattctcattgcctcagcctcctaagtagctgggattacaggttttataggatcacattgacaaaagtaccatggagttttatgagtcagcatattttattgttcttattccttcaatagttattacagtaattttcctcttcttctggcttttcatgaaagaaacattatatgatgaagttcttgcaaaacagaaaagagaacaaaagcttattcctaccaaaacagataaaaagaaagcagaaaagaaaaagaataaaaagaaagaaatccagaatggaaacctccatgaatccgactctgagagtgtacctcgagactttaaattatcagatgctttggcagtagaagatgatcaagttgcacctgttccattgaatgtcgttgaaacttcaagtagtgttagggaaagaaaaaagaaggaaaagaaacaaaagcctgtgcttgaagagcaggtcatcaaagaaagtgacgcatcaaagattcctggcaaaaaagtagaacctgtcccagttactaaacagcccacccctccctctgaagcagctgcctcgaagaagaaaccagggcagaagaagtctaaaaatggaagcgatgaccaggataaaaaggtggaaactctcatggtaccatcaaaaaggcaagaagcattgcccctccaccaagagactaaacaagaaagtggatcagggaagaagaaagcttcatcaaagaaacaaaagacagaaaatgtcttcgtagatgaaccccttattcatgcaactacttatattcctttgatggataatgctgactcaagtcctgtggtagataagagagaggttattgatttgcttaaacctgaccaagtagaagggatccagaaatctgggactaaaaaactgaagaccgaaactgacaaagaaaatgctgaagtgaagtttaaagattttcttctgtccttgaagactatgatgttttctgaagatgaggctctttgtgttgtagacttgctaaaggagaagtctggtgtaatacaagatgctttaaagaagtcaagtaagggagaattgactacgcttatacatcagcttcaagaaaaggacaagttactcgctgctgtgaaggaagatgctgctgctacaaaggatcggtgtaagcagttaacccaggaaatgatgacagagaaagaaagaagcaatgtggttataacaaggatgaaagatcgaattggaacattagaaaaggaacataatgtatttcaaaacaaaatacatgtcagttatcaagagactcaacagatgcagatgaagtttcagcaagttcgtgagcagatggaggcagagatagctcacttgaagcaggaaaatggtatactgagagatgcagtcagcaacactacaaatcaactggaaagcaagcagtctgcagaactaaataaactacgccaggattatgctaggttggtgaatgagctgactgagaaaacaggaaagctacagcaagaggaagtccaaaagaagaatgctgagcaagcagctactcagttgaaggttcaactacaagaagctgagagaaggtgggaagaagttcagagctacatcaggaagagaacagcggaacatgaggcagcacagcaagatttacagagtaaatttgtggccaaagaaaatgaagtacagagtctgcatagtaagcttacagataccttggtatcaaaacaacagttggagcaaagactaatgcagttaatggaatcagagcagaaaagggtgaacaaagaagagtctctacaaatgcaggttcaggatattttggagcagaatgaggctttgaaagctcaaattcagcagttccattcccagatagcagcccagacctccgcttcagttctagcagaagaattacataaagtgattgcagaaaaggataagcagataaaacagactgaagattctttagcaagtgaacgtgatcgtttaacaagtaaagaagaggaacttaaggatatacagaatatgaatttcttattaaaagctgaagtgcagaaattacaggccctggcaaatgagcaggctgctgctgcacatgaattggagaagatgcaacaaagtgtttatgttaaagatgataaaataagattgctggaagagcaactacaacatgaaatttcaaacaaaatggaagaatttaagattctaaatgaccaaaacaaagcattaaaatcagaagttcagaagctacagactcttgtttctgaacagcctaataaggatgttgtggaacaaatggaaaaatgcattcaagaaaaagatgagaagttaaagactgtggaagaattacttgaaactggacttattcaggtggcaactaaagaagaggagctgaatgcaataagaacagaaaattcatctctgacaaaagaagttcaagacttaaaagctaagcaaaatgatcaggtttcttttgcctctctagttgaagaacttaagaaagtgatccatgagaaagatggaaagatcaagtctgtagaagagcttctggaggcagaacttctcaaagttgctaacaaggagaaaactgttcagttatctatcacttccaaagttcaggagcttcagaacttattaaaaggaaaagaggaacagatgaataccatgaaggctgttttggaagagaaagagaaagacctagccaatacagggaagtggttacaggatcttcaagaagaaaatgaatctttaaaagcacatgttcaggaagtagcacaacataacttgaaagaggcctcttctgcatcacagtttgaagaacttgagattgtgttgaaagaaaaggaaaatgaattgaagaggttagaagccatgctaaaagagagggagagtgatctttctagcaaaacacagctgttacaggatgtacaagatgaaaacaaattgtttaagtcccaaattgagcagcttaaacaacaaaactaccaacaggcatcttcttttccccctcatgaagaattattaaaagtaatttcagaaagagagaaagaaataagtggtctctggaatgagttagattctttgaaggatgcagttgaacaccagaggaagaaaaacaatgaccttcgggagaaaaactgggaagcaatggaagcattggcatcaactgaaaaaatgctgcaggacaaagtgaacaagacttccaaggaaaggcagcaacaggtggaagctgttgagttggaggctaaagaagttctcaaaaaattatttccaaaggtgtctgtcccttctaatttgagttatggtgaatggttgcatggatttgaaaaaaaggcaaaagaatgtatggctggaacttcagggtcagaggaggttaaggttctagagcacaagttgaaagaagctgatgaaatgcacacattgttacagctagagtgtgaaaaatacaaatccgtccttgcagaaacagaaggaattttacagaagctacagagaagtgttgagcaagaagaaaataaatggaaagttaaggtcgatgaatcacacaagactattaaacagatgcagtcatcatttacatcttcagaacaagagctagagcgattaagaagcgaaaataaggatattgaaaatctgagaagagaacgagaacatttggaaatggaactagaaaaggcagagatggaacgatctacctatgttacagaagtcagagagttgaaggcacagttaaatgaaacactcacaaaacttagaactgaacaaaatgaaagacagaaggtagctggtgatttgcataaggctcaacagtcactggagcttatccagtcaaaaatagtaaaagctgctggagacactactgttattgaaaatagtgatgtttccccagaaacggagtcttctgagaaggagacaatgtctgtaagtctaaatcagactgtaacacagttacagcagttgcttcaggcggtaaaccaacagctcacaaaggagaaagagcactaccaggtgttagagtgatcatcctctggcctaccttgacacatgctctccttcaaaatgctaattcagagtgaagtaattgggaaactgttcatttgaggataaaaaaggcattgtattatattttgccaaattaaagccttatttatgttttcaccctttctactttgtcagaaacactgaacagagttttgtcttttctaatccttgttagactactgatttaaagaaggaaaaaaaaaagccaactctgtagacaccttcagagtttagttttataataaaaactgtttgaataattagacctttacattcctgaagataaacatgtaatcttttatcttattttgctcaataaaattgttcagaagatcaaagtggtaaagacaatgtaaaatttaacattttaatactgatgttgtacactgttttacttaacattttgggaagtaactgcctctgacttcaactcaagaaaacacttttttgttgctaatgtaatcggtttttgtaatggcgtcagcaaataaaaggatgcttattattcaaacttgaaaaaaaaaaaaaaaaaa

SEQ ID NO: 142 - DNA, 4930 bp, Homo sapiens
gaagccgcccgtttcctgccgagcggcgcgacggcacctgagcgactgcggcggcggcggcggcggcggcggcgcctcggagcgggcggcccgggctgtagtgccggcgccgccgcgtcttcccggtctcctttcccggccgcacagggtagattttcgttccgtcacccaggctggagtgcagtggtgtgaccttggcttgctgcaaccctttgcctcctgggttcaagtgattctcattgcctcagcctcctaagtagctgggattacaggttttataggatcacattgacaaaagtaccatggagttttatgagtcagcatattttattgttcttattccttcaatagttattacagtaattttcctcttcttctggcttttcatgaaagaaacattatatgatgaagttcttgcaaaacagaaaagagaacaaaagcttattcctaccaaaacagataaaaagaaagcagaaaagaaaaagaataaaaagaaagaaatccagaatggaaacctccatgaatccgactctgagagtgtacctcgagactttaaattatcagatgctttggcagtagaagatgatcaagttgcacctgttccattgaatgtcgttgaaacttcaagtagtgttagggaaagaaaaaagaaggaaaagaaacaaaagcctgtgcttgaagagcaggtcatcaaagaaagtgacgcatcaaagattcctggcaaaaaagtagaacctgtcccagttactaaacagcccacccctccctctgaagcagctgcctcgaagaagaaaccagggcagaagaagtctaaaaatggaagcgatgaccaggataaaaaggtggaaactctcatggtaccatcaaaaaggcaagaagcattgcccctccaccaagagactaaacaagaaagtggatcagggaagaagaaagcttcatcaaagaaacaaaagacagaaaatgtcttcgtagatgaaccccttattcatgcaactacttatattcctttgatggataatgctgactcaagtcctgtggtagataagagagaggttattgatttgcttaaacctgaccaagtagaagggatccagaaatctgggactaaaaaactgaagaccgaaactgacaaagaaaatgctgaagtgaagtttaaagattttcttctgtccttgaagactatgatgttttctgaagatgaggctctttgtgttgtagacttgctaaaggagaagtctggtgtaatacaagatgctttaaagaagtcaagtaagggagaattgactacgcttatacatcagcttcaagaaaaggacaagttactcgctgctgtgaaggaagatgctgctgctacaaaggatcggtgtaagcagttaacccaggaaatgatgacagagaaagaaagaagcaatgtggttataacaaggatgaaagatcgaattggaacattagaaaaggaacataatgtatttcaaaacaaaatacatgtcagttatcaagagactcaacagatgcagatgaagtttcagcaagttcgtgagcagatggaggcagagatagctcacttgaagcaggaaaatggtatactgagagatgcagtcagcaacactacaaatcaactggaaagcaagcagtctgcagaactaaataaactacgccaggattatgctaggttggtgaatgagctgactgagaaaacaggaaagctacagcaagaggaagtccaaaagaagaatgctgagcaagcagctactcagttgaaggttcaactacaagaagctgagagaaggtgggaagaagttcagagctacatcaggaagagaacagcggaacatgaggcagcacagcaagatttacagagtaaatttgtggccaaagaaaatgaagtacagagtctgcatagtaagcttacagataccttggtatcaaaacaacagttggagcaaagactaatgcagttaatggaatcagagcagaaaagggtgaacaaagaagagtctctacaaatgcaggttcaggatattttggagcagaatgaggctttgaaagctcaaattcagcagttccattcccagatagcagcccagacctccgcttcagttctagcagaagaattacataaagtgattgcagaaaaggataagcagataaaacagactgaagattctttagcaagtgaacgtgatcgtttaacaagtaaagaagaggaacttaaggatatacagaatatgaatttcttattaaaagctgaagtgcagaaattacaggccctggcaaatgagcaggctgctgctgcacatgaattggagaagatgcaacaaagtgtttatgttaaagatgataaaataagattgctggaagagcaactacaacatgaaatttcaaacaaaatggaagaatttaagattctaaatgaccaaaacaaagcattaaaatcagaagttcagaagctacagactcttgtttctgaacagcctaataaggatgttgtggaacaaatggaaaaatgcattcaagaaaaagatgagaagttaaagactgtggaagaattacttgaaactggacttattcaggtggcaactaaagaagaggagctgaatgcaataagaacagaaaattcatctctgacaaaagaagttcaagacttaaaagctaagcaaaatgatcaggtttcttttgcctctctagttgaagaacttaagaaagtgatccatgagaaagatggaaagatcaagtctgtagaagagcttctggaggcagaacttctcaaagttgctaacaaggagaaaactgttcaggatttgaaacaggaaataaaggctctaaaagaagaaataggaaatgtccagcttgaaaaggctcaacagttatctatcacttccaaagttcaggagcttcagaacttattaaaaggaaaagaggaacagatgaataccatgaaggctgttttggaagagaaagagaaagacctagccaatacagggaagtggttacaggatcttcaagaagaaaatgaatctttaaaagcacatgttcaggaagtagcacaacataacttgaaagaggcctcttctgcatcacagtttgaagaacttgagattgtgttgaaagaaaaggaaaatgaattgaagaggttagaagccatgctaaaagagagggagagtgatctttctagcaaaacacagctgttacaggatgtacaagatgaaaacaaattgtttaagtcccaaattgagcagcttaaacaacaaaactaccaacaggcatcttcttttccccctcatgaagaattattaaaagtaatttcagaaagagagaaagaaataagtggtctctggaatgagttagattctttgaaggatgcagttgaacaccagaggaagaaaaacaatgaccttcgggagaaaaactgggaagcaatggaagcattggcatcaactgaaaaaatgctgcaggacaaagtgaacaagacttccaaggaaaggcagcaacaggtggaagctgttgagttggaggctaaagaagttctcaaaaaattatttccaaaggtgtctgtcccttctaatttgagttatggtgaatggttgcatggatttgaaaaaaaggcaaaagaatgtatggctggaacttcagggtcagaggaggttaaggttctagagcacaagttgaaagaagctgatgaaatgcacacattgttacagctagagtgtgaaaaatacaaatccgtccttgcagaaacagaaggaattttacagaagctacagagaagtgttgagcaagaagaaaataaatggaaagttaaggtcgatgaatcacacaagactattaaacagatgcagtcatcatttacatcttcagaacaagagctagagcgattaagaagcgaaaataaggatattgaaaatctgagaagagaacgagaacatttggaaatggaactagaaaaggcagagatggaacgatctacctatgttacagaagtcagagagctgaaagatctgttgactgaattgcagaaaaaacttgatgattcatattctgaagcagtaagacagaatgaagagctaaatttgttgaaggcacagttaaatgaaacactcacaaaacttagaactgaacaaaatgaaagacagaaggtagctggtgatttgcataaggctcaacagtcactggagcttatccagtcaaaaatagtaaaagctgctggagacactactgttattgaaaatagtgatgtttccccagaaacggagtcttctgagaaggagacaatgtctgtaagtctaaatcagactgtaacacagttacagcagttgcttcaggcggtaaaccaacagctcacaaaggagaaagagcactaccaggtgttagagtgatcatcctctggcctaccttgacacatgctctccttcaaaatgctaattcagagtgaagtaattgggaaactgttcatttgaggataaaaaaggcattgtattatattttgccaaattaaagccttatttatgttttcaccctttctactttgtcagaaacactgaacagagttttgtcttttctaatccttgttagactactgatttaaagaaggaaaaaaaaaagccaactctgtagacaccttcagagtttagttttataataaaaactgtttgaataattagacctttacattcctgaagataaacatgtaatcttttatcttattttgctcaataaaattgttcagaagatcaaagtggtaaagacaatgtaaaatttaacattttaatactgatgttgtacactgttttacttaacattttgggaagtaactgcctctgacttcaactcaagaaaacacttttttgttgctaatgtaatcggtttttgtaatggcgtcagcaaataaaaggatgcttattattcaaacttgaaaaaaaaaaaaaaaaaa

SEQ ID NO: 143 - DNA, 2714 bp, Homo sapiens
agtgtcgcgataaatgggcgccggcggagcggagggagatccgagcggcggcggcaagctggctgcgagcggctgagcactccaagctcgccggcctttggtctccaggacttgtcccagcagcccctcgaactgagaattacaccatcggacccctggctctgaggccttcagacttggactgtgtcacactgccaggcttccagggctccaacttgcagacggcctgttgtgggacagtctctgtaatcgcgaaagcaaccatggaagacctgggggaaaacaccatggttttatccaccctgagatctttgaacaacttcatctctcagcgtgtggagggaggctctggactggatatttctacctcggccccaggttctctgcagatgcagtaccagcagagcatgcagctggaggaaagagcagagcagatccgttcgaagtcccacctcatccaggtggagcgggagaaaatgcagatggagctgagtcacaagagggctcgagtggagctggagagagcagccagcaccagtgccaggaactacgagcgtgaggtcgaccgcaaccaggagctcctgacgcgcatccggcagcttcaggagcgggaggccggggcggaggagaagatgcaggagcagctggagcgcaacaggcagtgtcagcagaacttggatgctgccagcaagaggctgcgtgagaaagaggacagtctggcccaggctggcgagaccatcaacgcactgaaggggaggatctcggaactgcagtggagcgtgatggaccaggagatgcgggtgaagcgcctggagtcggagaagcaggagctgcaggagcagctggacctgcaacacaaaaaatgccaggaagccaatcagaaaatccaggaactccaggccagccaagaagcaagagcagaccacgagcagcagattaaggatctggagcagaagctgtccctgcaagagcaggatgcagcgattgtgaagaacatgaagtctgagctggtacggctccctaggctggaacgggagctgaagcagctgcgggaggagagcgcgcacctgcgggagatgagagagaccaacgggctgctccaggaagagctggaagggctgcagaggaagctggggcgccaggagaagatgcaggagacgctggttggcttggagctggagaacgagaggctgctggccaagctgcaaagctgggagagactggaccagaccatgggcctgagcatcaggactccagaagacctttccagattcgtggttgagctgcagcagagggagcttgccttgaaggacaagaacagcgccgtcaccagcagcgcccgggggctggagaaggccaggcagcagctgcaggaggagctccggcaggtcagcggccagctgttggaggagaggaagaagcgcgagacccacgaggcgctggcccggaggctccagaaacgggtcctgctgctcaccaaggagcgggacggtatgcgggccatcctggggtcctacgacagcgagctgaccccggccgagtactcaccccagctgacgcggcgcatgcgggaggctgaggatatggtgcagaaggtgcacagccacagcgccgagatggaggctcagctgtcgcaggccctggaggagctgggaggccagaaacaaagagcagacatgctggagatggagctgaagatgctgaagtctcagtccagctctgccgaacagagcttcctgttctccagggaggaggcggacacgctcaggttgaaggtcgaggagctggaaggcgagcggagtcggctggaggaggaaaagaggatgctggaggcacagctggagcggcgagctctgcagggtgactatgaccagagcaggaccaaagtgctgcacatgagcctgaaccccaccagtgtggccaggcagcgcctgcgcgaggaccacagccagctgcaggcggagtgcgagcgactgcgcgggctcctgcgcgccatggagagaggaggcaccgtcccagccgaccttgaggctgccgccgcgagtctgccatcgtccaaggaggtggcagagctgaagaagcaggtggagagtgccgagctgaagaaccagcggctcaaggaggttttccagaccaagatccaggagttccgcaaggcctgctacacgctcaccggctaccagatcgacatcaccacggagaaccagtaccggctgacctcgctgtacgccgagcacccaggcgactgcctcatcttcaaggccaccagcccctcgggttccaagatgcagctactggagacagagttctcacacaccgtgggcgagctcatcgaggtgcacctgcggcgccaggacagcatccctgccttcctcagctcgctcaccctcgagctcttcagccgccagaccgtggcgtagcctgcaggctcgggggcatagccggagccactctgcttggcctgacctgcaggtcccctgccccgccagccacaggctgggtgcacgtcctgcctctccagccccacagggcagcagcatgactgacagacacgctgggacctacgtcgggcttcctgctggggcggccagcaccctctccacgtgcagaccccatgcgtcccggagcctggtgtgtgggcgtcggccaccagcctgggttcctcaccttgtgaaataaaatcttctcccctagacacaaaaaaaaaaaaaaaa

SEQ ID NO: 144 - DNA, 2538 bp, Homo sapiens
agtgtcgcgataaatgggcgccggcggagcggagggagatccgagcggcggcggcaagctggctgcgagcggctgaggaaagcaaccatggaagacctgggggaaaacaccatggttttatccaccctgagatctttgaacaacttcatctctcagcgtgtggagggaggctctggactggatatttctacctcggccccaggttctctgcagatgcagtaccagcagagcatgcagctggaggaaagagcagagcagatccgttcgaagtcccacctcatccaggtggagcgggagaaaatgcagatggagctgagtcacaagagggctcgagtggagctggagagagcagccagcaccagtgccaggaactacgagcgtgaggtcgaccgcaaccaggagctcctgacgcgcatccggcagcttcaggagcgggaggccggggcggaggagaagatgcaggagcagctggagcgcaacaggcagtgtcagcagaacttggatgctgccagcaagaggctgcgtgagaaagaggacagtctggcccaggctggcgagaccatcaacgcactgaaggggaggatctcggaactgcagtggagcgtgatggaccaggagatgcgggtgaagcgcctggagtcggagaagcaggagctgcaggagcagctggacctgcaacacaaaaaatgccaggaagccaatcagaaaatccaggaactccaggccagccaagaagcaagagcagaccacgagcagcagattaaggatctggagcagaagctgtccctgcaagagcaggatgcagcgattgtgaagaacatgaagtctgagctggtacggctccctaggctggaacgggagctgaagcagctgcgggaggagagcgcgcacctgcgggagatgagagagaccaacgggctgctccaggaagagctggaagggctgcagaggaagctggggcgccaggagaagatgcaggagacgctggttggcttggagctggagaacgagaggctgctggccaagctgcaaagctgggagagactggaccagaccatgggcctgagcatcaggactccagaagacctttccagattcgtggttgagctgcagcagagggagcttgccttgaaggacaagaacagcgccgtcaccagcagcgcccgggggctggagaaggccaggcagcagctgcaggaggagctccggcaggtcagcggccagctgttggaggagaggaagaagcgcgagacccacgaggcgctggcccggaggctccagaaacgggtcctgctgctcaccaaggagcgggacggtatgcgggccatcctggggtcctacgacagcgagctgaccccggccgagtactcaccccagctgacgcggcgcatgcgggaggctgaggatatggtgcagaaggtgcacagccacagcgccgagatggaggctcagctgtcgcaggccctggaggagctgggaggccagaaacaaagagcagacatgctggagatggagctgaagatgctgaagtctcagtccagctctgccgaacagagcttcctgttctccagggaggaggcggacacgctcaggttgaaggtcgaggagctggaaggcgagcggagtcggctggaggaggaaaagaggatgctggaggcacagctggagcggcgagctctgcagggtgactatgaccagagcaggaccaaagtgctgcacatgagcctgaaccccaccagtgtggccaggcagcgcctgcgcgaggaccacagccagctgcaggcggagtgcgagcgactgcgcgggctcctgcgcgccatggagagaggaggcaccgtcccagccgaccttgaggctgccgccgcgagtctgccatcgtccaaggaggtggcagagctgaagaagcaggtggagagtgccgagctgaagaaccagcggctcaaggaggttttccagaccaagatccaggagttccgcaaggcctgctacacgctcaccggctaccagatcgacatcaccacggagaaccagtaccggctgacctcgctgtacgccgagcacccaggcgactgcctcatcttcaaggccaccagcccctcgggttccaagatgcagctactggagacagagttctcacacaccgtgggcgagctcatcgaggtgcacctgcggcgccaggacagcatccctgccttcctcagctcgctcaccctcgagctcttcagccgccagaccgtggcgtagcctgcaggctcgggggcatagccggagccactctgcttggcctgacctgcaggtcccctgccccgccagccacaggctgggtgcacgtcctgcctctccagccccacagggcagcagcatgactgacagacacgctgggacctacgtcgggcttcctgctggggcggccagcaccctctccacgtgcagaccccatgcgtcccggagcctggtgtgtgggcgtcggccaccagcctgggttcctcaccttgtgaaataaaatcttctcccctagacacaaaaaaaaaaaaaaaa

SEQ ID NO: 145 - DNA, 2376 bp, Homo sapiens
agtgtcgcgataaatgggcgccggcggagcggagggagatccgagcggcggcggcaagctggctgcgagcggctgagcgtgaggtcgaccgcaaccaggagctcctgacgcgcatccggcagcttcaggagcgggaggccggggcggaggagaagatgcaggagcagctggagcgcaacaggcagtgtcagcagaacttggatgctgccagcaagaggctgcgtgagaaagaggacagtctggcccaggctggcgagggtcctgattgtcacgctccttactctggaattatcttatgcgcctcttccttgccaactgtccggcgtcccctacaacacgggtgaccctgtgggcaggtgggctcggccctgcatctggccttgcccctggcacacgaccatcaacgcactgaaggggaggatctcggaactgcagtggagcgtgatggaccaggagatgcgggtgaagcgcctggagtcggagaagcaggagctgcaggagcagctggacctgcaacacaaaaaatgccaggaagccaatcagaaaatccaggaactccaggccagccaagaagcaagagcagaccacgagcagcagattaaggatctggagcagaagctgtccctgcaagagcaggatgcagcgattgtgaagaacatgaagtctgagctggtacggctccctaggctggaacgggagctgaagcagctgcgggaggagagcgcgcacctgcgggagatgagagagaccaacgggctgctccaggaagagctggaagggctgcagaggaagctggggcgccaggagaagatgcaggagacgctggttggcttggagctggagaacgagaggctgctggccaagctgcaaagctgggagagactggaccagaccatgggcctgagcatcaggactccagaagacctttccagattcgtggttgagctgcagcagagggagcttgccttgaaggacaagaacagcgccgtcaccagcagcgcccgggggctggagaaggccaggcagcagctgcaggaggagctccggcaggtcagcggccagctgttggaggagaggaagaagcgcgagacccacgaggcgctggcccggaggctccagaaacgggtcctgctgctcaccaaggagcgggacggtatgcgggccatcctggggtcctacgacagcgagctgaccccggccgagtactcaccccagctgacgcggcgcatgcgggaggctgaggatatggtgcagaaggtgcacagccacagcgccgagatggaggctcagctgtcgcaggccctggaggagctgggaggccagaaacaaagagcagacatgctggagatggagctgaagatgctgaagtctcagtccagctctgccgaacagagcttcctgttctccagggaggaggcggacacgctcaggttgaaggtcgaggagctggaaggcgagcggagtcggctggaggaggaaaagaggatgctggaggcacagctggagcggcgagctctgcagggtgactatgaccagagcaggaccaaagtgctgcacatgagcctgaaccccaccagtgtggccaggcagcgcctgcgcgaggaccacagccagctgcaggcggagtgcgagcgactgcgcgggctcctgcgcgccatggagagaggaggcaccgtcccagccgaccttgaggctgccgccgcgagtctgccatcgtccaaggaggtggcagagctgaagaagcaggtggagagtgccgagctgaagaaccagcggctcaaggaggttttccagaccaagatccaggagttccgcaaggcctgctacacgctcaccggctaccagatcgacatcaccacggagaaccagtaccggctgacctcgctgtacgccgagcacccaggcgactgcctcatcttcaaggccaccagcccctcgggttccaagatgcagctactggagacagagttctcacacaccgtgggcgagctcatcgaggtgcacctgcggcgccaggacagcatccctgccttcctcagctcgctcaccctcgagctcttcagccgccagaccgtggcgtagcctgcaggctcgggggcatagccggagccactctgcttggcctgacctgcaggtcccctgccccgccagccacaggctgggtgcacgtcctgcctctccagccccacagggcagcagcatgactgacagacacgctgggacctacgtcgggcttcctgctggggcggccagcaccctctccacgtgcagaccccatgcgtcccggagcctggtgtgtgggcgtcggccaccagcctgggttcctcaccttgtgaaataaaatcttctcccctagacacaaaaaaaaaaaaaaaa

SEQ ID NO: 146 - DNA, 1318 bp, Homo sapiens
gaggctccgtaggatggtgaagaggttgagatgctgtccagcccacagaggccccggaaagccagtgccgcccgtcagaggggtctcctgagtgcgtgtgggtggctggattctgcatactgggttatcttaaccccggctgtgaaaactggatgaagtagcaatcctttcaaccccaagagtctgtgattcagccagagttacaagatgtctcttcatcctctgaggtttacaaggttctcagaaaacctgtgaagagctgcgcggatcctctcctgccccggcccagcggcagggctgccgcctccctctcccctgggcctgagtgggtggatttcccctcccctcctccttcccaggagaagcacagagggagcggccaagcgagccgtgtctgcaaaccccgcttccctctgcggcggcctctgccatcgtgccatggggccggaggtccctggtccagggtgactatgaccagagcaggaccaaagtgctgcacatgagcctgaaccccaccagtgtggccaggcagcgcctgcgcgaggaccacagccagctgcaggcggagtgcgagcgactgcgcgggctcctgcgcgccatggagagaggaggcaccgtcccagccgaccttgaggctgccgccgcgagtctgccatcgtccaaggaggtggcagagctgaagaagcaggtggagagtgccgagctgaagaaccagcggctcaaggaggttttccagaccaagatccaggagttccgcaaggcctgctacacgctcaccggctaccagatcgacatcaccacggagaaccagtaccggctgacctcgctgtacgccgagcacccaggcgactgcctcatcttcaaggccaccagcccctcgggttccaagatgcagctactggagacagagttctcacacaccgtgggcgagctcatcgaggtgcacctgcggcgccaggacagcatccctgccttcctcagctcgctcaccctcgagctcttcagccgccagaccgtggcgtagcctgcaggctcgggggcatagccggagccactctgcttggcctgacctgcaggtcccctgccccgccagccacaggctgggtgcacgtcctgcctctccagccccacagggcagcagcatgactgacagacacgctgggacctacgtcgggcttcctgctggggcggccagcaccctctccacgtgcagaccccatgcgtcccggagcctggtgtgtgggcgtcggccaccagcctgggttcctcaccttgtgaaataaaatcttctcccctagacacaaaaaaaaaaaaaaaa

SEQ ID NO: 147 - DNA, 2754 bp, Homo sapiens
agtgtcgcgataaatgggcgccggcggagcggagggagatccgagcggcggcggcaagctggctgcgagcggctgaggagctgggatacactcttcctctcctctcctcaacagcagcactccaagctcgccggcctttggtctccaggacttgtcccagcagcccctcgaactgagaattacaccatcggacccctggctctgaggccttcagacttggactgtgtcacactgccaggcttccagggctccaacttgcagacggcctgttgtgggacagtctctgtaatcgcgaaagcaaccatggaagacctgggggaaaacaccatggttttatccaccctgagatctttgaacaacttcatctctcagcgtgtggagggaggctctggactggatatttctacctcggccccaggttctctgcagatgcagtaccagcagagcatgcagctggaggaaagagcagagcagatccgttcgaagtcccacctcatccaggtggagcgggagaaaatgcagatggagctgagtcacaagagggctcgagtggagctggagagagcagccagcaccagtgccaggaactacgagcgtgaggtcgaccgcaaccaggagctcctgacgcgcatccggcagcttcaggagcgggaggccggggcggaggagaagatgcaggagcagctggagcgcaacaggcagtgtcagcagaacttggatgctgccagcaagaggctgcgtgagaaagaggacagtctggcccaggctggcgagaccatcaacgcactgaaggggaggatctcggaactgcagtggagcgtgatggaccaggagatgcgggtgaagcgcctggagtcggagaagcaggagctgcaggagcagctggacctgcaacacaaaaaatgccaggaagccaatcagaaaatccaggaactccaggccagccaagaagcaagagcagaccacgagcagcagattaaggatctggagcagaagctgtccctgcaagagcaggatgcagcgattgtgaagaacatgaagtctgagctggtacggctccctaggctggaacgggagctgaagcagctgcgggaggagagcgcgcacctgcgggagatgagagagaccaacgggctgctccaggaagagctggaagggctgcagaggaagctggggcgccaggagaagatgcaggagacgctggttggcttggagctggagaacgagaggctgctggccaagctgcaaagctgggagagactggaccagaccatgggcctgagcatcaggactccagaagacctttccagattcgtggttgagctgcagcagagggagcttgccttgaaggacaagaacagcgccgtcaccagcagcgcccgggggctggagaaggccaggcagcagctgcaggaggagctccggcaggtcagcggccagctgttggaggagaggaagaagcgcgagacccacgaggcgctggcccggaggctccagaaacgggtcctgctgctcaccaaggagcgggacggtatgcgggccatcctggggtcctacgacagcgagctgaccccggccgagtactcaccccagctgacgcggcgcatgcgggaggctgaggatatggtgcagaaggtgcacagccacagcgccgagatggaggctcagctgtcgcaggccctggaggagctgggaggccagaaacaaagagcagacatgctggagatggagctgaagatgctgaagtctcagtccagctctgccgaacagagcttcctgttctccagggaggaggcggacacgctcaggttgaaggtcgaggagctggaaggcgagcggagtcggctggaggaggaaaagaggatgctggaggcacagctggagcggcgagctctgcagggtgactatgaccagagcaggaccaaagtgctgcacatgagcctgaaccccaccagtgtggccaggcagcgcctgcgcgaggaccacagccagctgcaggcggagtgcgagcgactgcgcgggctcctgcgcgccatggagagaggaggcaccgtcccagccgaccttgaggctgccgccgcgagtctgccatcgtccaaggaggtggcagagctgaagaagcaggtggagagtgccgagctgaagaaccagcggctcaaggaggttttccagaccaagatccaggagttccgcaaggcctgctacacgctcaccggctaccagatcgacatcaccacggagaaccagtaccggctgacctcgctgtacgccgagcacccaggcgactgcctcatcttcaaggccaccagcccctcgggttccaagatgcagctactggagacagagttctcacacaccgtgggcgagctcatcgaggtgcacctgcggcgccaggacagcatccctgccttcctcagctcgctcaccctcgagctcttcagccgccagaccgtggcgtagcctgcaggctcgggggcatagccggagccactctgcttggcctgacctgcaggtcccctgccccgccagccacaggctgggtgcacgtcctgcctctccagccccacagggcagcagcatgactgacagacacgctgggacctacgtcgggcttcctgctggggcggccagcaccctctccacgtgcagaccccatgcgtcccggagcctggtgtgtgggcgtcggccaccagcctgggttcctcaccttgtgaaataaaatcttctcccctagacacaaaaaaaaaaaaaaaa

SEQ ID NO: 148 - DNA, 4400 bp, Homo sapiens
gggcccgcagcttccgtggctgagaggagccggcggcggcagtgtctgtggtggccgcggcggcgagagcgacggtcccatctttcccaccctcttggttgccgctggccacacgccctccgctggcggcgacttctcagctccgtgcgcccgggctggacagtgagcctcgagaggagacgcgggcggctagagccggagtggggcgagccgcggaacccggccgggagccgcgcgaggcgtgatcggagggtatggttggcatggaattgaatttcatctgtctgtgggaattgtaagcaagattgccatcacgaaagccaaagtggatttctccagtgtggtgtgcctgcccccttccgtcattgctgtgaatgggctggacggaggaggggccggcgaaaatgatgatgaaccagtgctcgtgtccttatctgcggcacccagtccccagagtgaagctgttgccaatgaactgcaggagctctccttgcagcccgagctgaccctaggcctccaccctggcaggaatcccaatttgcctccacttagtgagcggaagaatgtgctacagttgaaactccagcagcgccggacccgggaagaactggtgagccaagggatcatgccgcctttgaaaagtccagccgcatttcatgagcagagaaggagcttggagcgggccaggacagaggactatctcaaacggaagattcgttcccggccggagagatcggagctggtcaggatgcacattttggaagagacctcggctgagccatccctccaggccaagcagctgaagctgaagagagccagactagccgatgacctcaatgagaagattgcacagaggcctggccccatggagctggtggagaagaacatccttcctgttgagtccagcctgaaggaagccatcattgtgggccaggtgaactatcccaaagtagcagacagctcttccttcgatgaggacagcagcgatgccttatcccccgagcagcctgccagccatgagtcccagggttctgtgccgtcacccctggaggcccgagtcagcgaaccactgctcagtgccacctctgcatcccccacccagcaaagccaacccaagtctgccagtgagaagtcacagcgcagcaagaaggccaaggagctgaagccaaaggtgaagaagctcaagtaccaccagtacatccccccggaccagaagcaggacaggggggcaccccccatggactcatcctacgccaagatcctgcagcagcagcagctcttcctccagctgcagatcctcaaccagcagcagcagcagcaccacaactaccaggccatcctgcctgccccgccaaagtcagcaggcgaggccctgggaagcagcgggacccccccagtacgcagcctctccactaccaatagcagctccagctcgggcgcccctgggccctgtgggctggcacgtcagaacagcacctcactgactggcaagccgggagccctgccggccaacctggacgacatgaaggtggcagagctgaagcaggagctgaagttgcgatcactgcctgtctcgggcaccaaaactgagctgattgagcgccttcgagcctatcaagaccaaatcagccctgtgccaggagcccccaaggcccctgccgccacctctatcctgcacaaggctggcgaggtggtggtagccttcccagcggcccggctgagcacggggccagccctggtggcagcaggcctggctccagctgaggtggtggtggccacggtggccagcagtggggtggtgaagtttggcagcacgggctccacgccccccgtgtctcccaccccctcggagcgctcactgctcagcacgggcgatgaaaactccacccccggggacacctttggtgagatggtgacatcacctctgacgcagctgaccctgcaggcctcgccactgcagatcctcgtgaaggaggagggcccccgggccgggtcctgttgcctgagccctggggggcgggcggagctagaggggcgcgacaaggaccagatgctgcaggagaaagacaagcagatcgaggcgctgacgcgcatgctccggcagaagcagcagctggtggagcggctcaagctgcagctggagcaggagaagcgagcccagcagcccgcccccgcccccgcccccctcggcacccccgtgaagcaggagaacagcttctccagctgccagctgagccagcagcccctgggccccgctcacccattcaaccccagcctggcggccccagccaccaaccacatagacccttgtgctgtggccccggggcccccgtccgtggtggtgaagcaggaagccttgcagcctgagcccgagccggtccccgccccccagttgcttctggggcctcagggccccagcctcatcaagggggttgcacctcccaccctcatcaccgactccacagggacccaccttgtcctcaccgtgaccaataagaatgcagacagccctggcctgtccagtgggagcccccagcagccctcgtcccagcctggctctccagcgcctgccccctctgcccagatggacctggagcacccactgcagcccctctttgggacccccacttctctgctgaagaaggaaccacctggctatgaggaagccatgagccagcagcccaaacagcaggaaaatggttcctcaagccagcagatggacgacctgtttgacattctcattcagagcggagaaatttcagcagatttcaaggagccgccatccctgccagggaaggagaagccatccccgaagacagtctgtgggtcccccctggcagcacagccatcaccttctgctgagctcccccaggctgccccacctcctccaggctcaccctccctccctggacgcctggaggacttcctggagagcagcacggggctgcccctgctgaccagtgggcatgacgggccagagcccctttccctcattgacgacctccatagccagatgctgagcagcactgccatcctggaccaccccccgtcacccatggacacctcggaattgcactttgttcctgagcccagcagcaccatgggcctggacctggctgatggccacctggacagcatggactggctggagctgtcgtcaggtggtcccgtgctgagcctagcccccctcagcaccacagcccccagcctcttctccacagacttcctcgatggccatgatttgcagctgcactgggattcctgcttgtagctctctggctcaagacggggtggggaaggggctgggagccagggtactccaatgcgtggctctcctgcgtgattcggcctctccacatggttgtgagtcttgacaatcacagcccctgctttttcccttccctgggaggctagaacagagaagcccttactcctggttcagtgccacgcagggcagaggagagcagctgtcaagaagcagccctggctctcacgctggggttttggacacacggtcagggtcagggccatttcagcttgacctccttttttgaggtcagggggcactgtctgtctggctacaatttggctaaggtaggtgaagcctggccaggcgggaggcttctcttctgacccagggctgagacaggttaaggggtgaatctccttcctttctctccctgctttgctgtgaagggagaaattagcctgggcctctaccccctattccctgtgtctgccaaccccaggatcccagggctccctgccattttagtgtcttggtgtagtgtaaccatttagtggttggtggcaacaattttatgtacaggtgtatatacctctatattatatatcgacatacatatatatttttgggggggggcggacaggagatgggtgcaactccctcccatcctactctcacagaagggcctggatgcaaggttacccttgagctgtgtgccacagtctggtgcccagtctggcatgcagctacccaggcccacccatcacgtgtgattgacatgtaggtaccctgccacggcctatgccccacctgccctgcttcctggctccttatcagtgccatgagggcagaggtgctacctggccttcctgccaggagctctccacccactcacattccgtccccgccgcctcactgcagccagcgtggccctaggacaggaggagcttcgggcccagcttcaccctgcggtggggctgaggggtggccatctcctgccctggggccactggcttcacattctgggctgactcataggggagtaggggtggagtcaccaaaaccagtgctgggacaaagatggggaaggtgtgtgaactttttaaaataaacacaaaaacacaggcctgttaaaaaaaaaaaaaaaaaaaaa

SEQ ID NO: 149 - DNA, 4560 bp, Homo sapiens
gggcccgcagcttccgtggctgagaggagccggcggcggcagtgtctgtggtggccgcggcggcgagagcgacggtcccatctttcccaccctcttggttgccgctggccacacgccctccgctggcggcgacttctcagctccgtgcgcccgggctggacagtgagcctcgagaggagacgcgggcggctagagccggagtggggcgagccgcggaacccggccgggagccgcgcgaggcgtgatcggagggtatggttggcatggaattgaatttcatctgtctgtgggaattgtaagcaagattgccatcacgaaagccaaagtggatttctccagtgtggtgtgcctgcccccttccgtcattgctgtgaatgggctggacggaggaggggccggcgaaaatgatgatgaaccagtgctcgtgtccttatctgcggcacccagtccccagagtgaagctgttgccaatgaactgcaggagctctccttgcagcccgagctgaccctaggcctccaccctggcaggaatcccaatttgcctccacttagtgagcggaagaatgtgctacagttgaaactccagcagcgccggacccgggaagaactggtgagccaagggatcatgccgcctttgaaaagtccagccgcatttcatgagcagagaaggagcttggagcgggccaggacagaggactatctcaaacggaagattcgttcccggccggagagatcggagctggtcaggatgcacattttggaagagacctcggctgagccatccctccaggccaagcagctgaagctgaagagagccagactagccgatgacctcaatgagaagattgcacagaggcctggccccatggagctggtggagaagaacatccttcctgttgagtccagcctgaaggaagccatcattgtgggccaggtgaactatcccaaagtagcagacagctcttccttcgatgaggacagcagcgatgccttatcccccgagcagcctgccagccatgagtcccagggttctgtgccgtcacccctggaggcccgagtcagcgaaccactgctcagtgccacctctgcatcccccacccaggttgtgtctcaacttccgatgggccgggattccagagaaatgcttttcctggcagagcagcctcctctgcctcccccacctctgctgcctcccagcctcaccaatggaaccactatccccactgccaagtccacccccacactcattaagcaaagccaacccaagtctgccagtgagaagtcacagcgcagcaagaaggccaaggagctgaagccaaaggtgaagaagctcaagtaccaccagtacatccccccggaccagaagcaggacaggggggcaccccccatggactcatcctacgccaagatcctgcagcagcagcagctcttcctccagctgcagatcctcaaccagcagcagcagcagcaccacaactaccaggccatcctgcctgccccgccaaagtcagcaggcgaggccctgggaagcagcgggacccccccagtacgcagcctctccactaccaatagcagctccagctcgggcgcccctgggccctgtgggctggcacgtcagaacagcacctcactgactggcaagccgggagccctgccggccaacctggacgacatgaaggtggcagagctgaagcaggagctgaagttgcgatcactgcctgtctcgggcaccaaaactgagctgattgagcgccttcgagcctatcaagaccaaatcagccctgtgccaggagcccccaaggcccctgccgccacctctatcctgcacaaggctggcgaggtggtggtagccttcccagcggcccggctgagcacggggccagccctggtggcagcaggcctggctccagctgaggtggtggtggccacggtggccagcagtggggtggtgaagtttggcagcacgggctccacgccccccgtgtctcccaccccctcggagcgctcactgctcagcacgggcgatgaaaactccacccccggggacacctttggtgagatggtgacatcacctctgacgcagctgaccctgcaggcctcgccactgcagatcctcgtgaaggaggagggcccccgggccgggtcctgttgcctgagccctggggggcgggcggagctagaggggcgcgacaaggaccagatgctgcaggagaaagacaagcagatcgaggcgctgacgcgcatgctccggcagaagcagcagctggtggagcggctcaagctgcagctggagcaggagaagcgagcccagcagcccgcccccgcccccgcccccctcggcacccccgtgaagcaggagaacagcttctccagctgccagctgagccagcagcccctgggccccgctcacccattcaaccccagcctggcggccccagccaccaaccacatagacccttgtgctgtggccccggggcccccgtccgtggtggtgaagcaggaagccttgcagcctgagcccgagccggtccccgccccccagttgcttctggggcctcagggccccagcctcatcaagggggttgcacctcccaccctcatcaccgactccacagggacccaccttgtcctcaccgtgaccaataagaatgcagacagccctggcctgtccagtgggagcccccagcagccctcgtcccagcctggctctccagcgcctgccccctctgcccagatggacctggagcacccactgcagcccctctttgggacccccacttctctgctgaagaaggaaccacctggctatgaggaagccatgagccagcagcccaaacagcaggaaaatggttcctcaagccagcagatggacgacctgtttgacattctcattcagagcggaggtaaccccagaaatttcagcagatttcaaggagccgccatccctgccagggaaggagaagccatccccgaagacagtctgtgggtcccccctggcagcacagccatcaccttctgctgagctcccccaggctgccccacctcctccaggctcaccctccctccctggacgcctggaggacttcctggagagcagcacggggctgcccctgctgaccagtgggcatgacgggccagagcccctttccctcattgacgacctccatagccagatgctgagcagcactgccatcctggaccaccccccgtcacccatggacacctcggaattgcactttgttcctgagcccagcagcaccatgggcctggacctggctgatggccacctggacagcatggactggctggagctgtcgtcaggtggtcccgtgctgagcctagcccccctcagcaccacagcccccagcctcttctccacagacttcctcgatggccatgatttgcagctgcactgggattcctgcttgtagctctctggctcaagacggggtggggaaggggctgggagccagggtactccaatgcgtggctctcctgcgtgattcggcctctccacatggttgtgagtcttgacaatcacagcccctgctttttcccttccctgggaggctagaacagagaagcccttactcctggttcagtgccacgcagggcagaggagagcagctgtcaagaagcagccctggctctcacgctggggttttggacacacggtcagggtcagggccatttcagcttgacctccttttttgaggtcagggggcactgtctgtctggctacaatttggctaaggtaggtgaagcctggccaggcgggaggcttctcttctgacccagggctgagacaggttaaggggtgaatctccttcctttctctccctgctttgctgtgaagggagaaattagcctgggcctctaccccctattccctgtgtctgccaaccccaggatcccagggctccctgccattttagtgtcttggtgtagtgtaaccatttagtggttggtggcaacaattttatgtacaggtgtatatacctctatattatatatcgacatacatatatatttttgggggggggcggacaggagatgggtgcaactccctcccatcctactctcacagaagggcctggatgcaaggttacccttgagctgtgtgccacagtctggtgcccagtctggcatgcagctacccaggcccacccatcacgtgtgattgacatgtaggtaccctgccacggcctatgccccacctgccctgcttcctggctccttatcagtgccatgagggcagaggtgctacctggccttcctgccaggagctctccacccactcacattccgtccccgccgcctcactgcagccagcgtggccctaggacaggaggagcttcgggcccagcttcaccctgcggtggggctgaggggtggccatctcctgccctggggccactggcttcacattctgggctgactcataggggagtaggggtggagtcaccaaaaccagtgctgggacaaagatggggaaggtgtgtgaactttttaaaataaacacaaaaacacaggcctgttaaaaaaaaaaaaaaaaaaaaa

SEQ ID NO: 150 - DNA, 4550 bp, Homo sapiens
gggcccgcagcttccgtggctgagaggagccggcggcggcagtgtctgtggtggccgcggcggcgagagcgacggtcccatctttcccaccctcttggttgccgctggccacacgccctccgctggcggcgacttctcagctccgtgcgcccgggctggacagtgagcctcgagaggagacgcgggcggctagagccggagtggggcgagccgcggaacccggccgggagccgcgcgaggcgtgatcggagggtatggttggcatggaattgaatttcatctgtctgtgggaattgtaagcaagattgccatcacgaaagccaaagtggatttctccagtgtggtgtgcctgcccccttccgtcattgctgtgaatgggctggacggaggaggggccggcgaaaatgatgatgaaccagtgctcgtgtccttatctgcggcacccagtccccagagtgaagctgttgccaatgaactgcaggagctctccttgcagcccgagctgaccctaggcctccaccctggcaggaatcccaatttgcctccacttagtgagcggaagaatgtgctacagttgaaactccagcagcgccggacccgggaagaactggtgagccaagggatcatgccgcctttgaaaagtccagccgcatttcatgagcagagaaggagcttggagcgggccaggacagaggactatctcaaacggaagattcgttcccggccggagagatcggagctggtcaggatgcacattttggaagagacctcggctgagccatccctccaggccaagcagctgaagctgaagagagccagactagccgatgacctcaatgagaagattgcacagaggcctggccccatggagctggtggagaagaacatccttcctgttgagtccagcctgaaggaagccatcattgtgggccaggtgaactatcccaaagtagcagacagctcttccttcgatgaggacagcagcgatgccttatcccccgagcagcctgccagccatgagtcccagggttctgtgccgtcacccctggaggcccgagtcagcgaaccactgctcagtgccacctctgcatcccccacccaggttgtgtctcaacttccgatgggccgggattccagagaaatgcttttcctggcagagcagcctcctctgcctcccccacctctgctgcctcccagcctcaccaatggaaccactatccccactgccaagtccacccccacactcattaagcaaagccaacccaagtctgccagtgagaagtcacagcgcagcaagaaggccaaggagctgaagccaaaggtgaagaagctcaagtaccaccagtacatccccccggaccagaagcaggacaggggggcaccccccatggactcatcctacgccaagatcctgcagcagcagcagctcttcctccagctgcagatcctcaaccagcagcagcagcagcaccacaactaccaggccatcctgcctgccccgccaaagtcagcaggcgaggccctgggaagcagcgggacccccccagtacgcagcctctccactaccaatagcagctccagctcgggcgcccctgggccctgtgggctggcacgtcagaacagcacctcactgactggcaagccgggagccctgccggccaacctggacgacatgaaggtggcagagctgaagcaggagctgaagttgcgatcactgcctgtctcgggcaccaaaactgagctgattgagcgccttcgagcctatcaagaccaaatcagccctgtgccaggagcccccaaggcccctgccgccacctctatcctgcacaaggctggcgaggtggtggtagccttcccagcggcccggctgagcacggggccagccctggtggcagcaggcctggctccagctgaggtggtggtggccacggtggccagcagtggggtggtgaagtttggcagcacgggctccacgccccccgtgtctcccaccccctcggagcgctcactgctcagcacgggcgatgaaaactccacccccggggacacctttggtgagatggtgacatcacctctgacgcagctgaccctgcaggcctcgccactgcagatcctcgtgaaggaggagggcccccgggccgggtcctgttgcctgagccctggggggcgggcggagctagaggggcgcgacaaggaccagatgctgcaggagaaagacaagcagatcgaggcgctgacgcgcatgctccggcagaagcagcagctggtggagcggctcaagctgcagctggagcaggagaagcgagcccagcagcccgcccccgcccccgcccccctcggcacccccgtgaagcaggagaacagcttctccagctgccagctgagccagcagcccctgggccccgctcacccattcaaccccagcctggcggccccagccaccaaccacatagacccttgtgctgtggccccggggcccccgtccgtggtggtgaagcaggaagccttgcagcctgagcccgagccggtccccgccccccagttgcttctggggcctcagggccccagcctcatcaagggggttgcacctcccaccctcatcaccgactccacagggacccaccttgtcctcaccgtgaccaataagaatgcagacagccctggcctgtccagtgggagcccccagcagccctcgtcccagcctggctctccagcgcctgccccctctgcccagatggacctggagcacccactgcagcccctctttgggacccccacttctctgctgaagaaggaaccacctggctatgaggaagccatgagccagcagcccaaacagcaggaaaatggttcctcaagccagcagatggacgacctgtttgacattctcattcagagcggagaaatttcagcagatttcaaggagccgccatccctgccagggaaggagaagccatccccgaagacagtctgtgggtcccccctggcagcacagccatcaccttctgctgagctcccccaggctgccccacctcctccaggctcaccctccctccctggacgcctggaggacttcctggagagcagcacggggctgcccctgctgaccagtgggcatgacgggccagagcccctttccctcattgacgacctccatagccagatgctgagcagcactgccatcctggaccaccccccgtcacccatggacacctcggaattgcactttgttcctgagcccagcagcaccatgggcctggacctggctgatggccacctggacagcatggactggctggagctgtcgtcaggtggtcccgtgctgagcctagcccccctcagcaccacagcccccagcctcttctccacagacttcctcgatggccatgatttgcagctgcactgggattcctgcttgtagctctctggctcaagacggggtggggaaggggctgggagccagggtactccaatgcgtggctctcctgcgtgattcggcctctccacatggttgtgagtcttgacaatcacagcccctgctttttcccttccctgggaggctagaacagagaagcccttactcctggttcagtgccacgcagggcagaggagagcagctgtcaagaagcagccctggctctcacgctggggttttggacacacggtcagggtcagggccatttcagcttgacctccttttttgaggtcagggggcactgtctgtctggctacaatttggctaaggtaggtgaagcctggccaggcgggaggcttctcttctgacccagggctgagacaggttaaggggtgaatctccttcctttctctccctgctttgctgtgaagggagaaattagcctgggcctctaccccctattccctgtgtctgccaaccccaggatcccagggctccctgccattttagtgtcttggtgtagtgtaaccatttagtggttggtggcaacaattttatgtacaggtgtatatacctctatattatatatcgacatacatatatatttttgggggggggcggacaggagatgggtgcaactccctcccatcctactctcacagaagggcctggatgcaaggttacccttgagctgtgtgccacagtctggtgcccagtctggcatgcagctacccaggcccacccatcacgtgtgattgacatgtaggtaccctgccacggcctatgccccacctgccctgcttcctggctccttatcagtgccatgagggcagaggtgctacctggccttcctgccaggagctctccacccactcacattccgtccccgccgcctcactgcagccagcgtggccctaggacaggaggagcttcgggcccagcttcaccctgcggtggggctgaggggtggccatctcctgccctggggccactggcttcacattctgggctgactcataggggagtaggggtggagtcaccaaaaccagtgctgggacaaagatggggaaggtgtgtgaactttttaaaataaacacaaaaacacaggcctgttaaaaaaaaaaaaaaaaaaaaa

SEQ ID NO: 151 - DNA, 7375 bp, Homo sapiens
gccttcaagtacaggccggggtccggaagcggtgataccccttctctttcccagtggccctcaaacttccttttcccgggtccttaagcgggccccgccgacagaggccaatcagagggcagcgcgagggggcggggccatagtttaaactaattgtgcgctcacagcgctggcgcgagcccacgaagaggtacgattccggagaatcgcgaggcagagcgggagcgcgcagccaggtggaaactaattctaagccagactgctggagatcaccctgttctagtgtgtggaggcttccaccaggaggcgcattggagtgactgtctggcatcaccaagatgacactccacgccacccggggggctgcactcctctcttgggtgaacagtctacacgtggctgaccctgtggaggctgtgctgcagctccaggactgcagcatcttcatcaagatcattgacagaatccatggcactgaagagggacagcaaatcttgaagcagccggtgtcagagagactggactttgtgtgcagttttctgcagaaaaatcgaaaacatccctcttccccagaatgcctggtatctgcacagaaggtgctagagggatcagagctggaactggcgaagatgaccatgctgctcttataccactctaccatgagctccaaaagtcccagggactgggaacagtttgaatataaaattcaggctgagttggctgtcattcttaaatttgtgctggaccatgaggacgggctaaaccttaatgaggacctagagaacttcctacagaaagctcctgtgccttctacctgttctagcacattccctgaagagctctccccacctagccaccaggccaagagggagattcgcttcctagagctacagaaggttgcctcctcttccagtgggaacaactttctctcaggttctccagcttctcccatgggtgatatcctgcagaccccacagttccagatgagacggctgaagaagcagcttgctgatgagagaagtaatagggatgagctggagctggagctagctgagaaccgcaagctcctcaccgagaaggatgcacagatagccatgatgcagcagcgcattgaccgcctagccctgctgaatgagaagcaggcggccagcccactggagcccaaggagcttgaggagctgcgtgacaagaatgagagccttaccatgcggctgcatgaaaccctgaagcagtgccaggacctgaagacagagaagagccagatggatcgcaaaatcaaccagctttcggaggagaatggagacctttcctttaagctgcgggagtttgccagtcatctgcagcagctacaggatgccctcaatgagctgacggaggagcacagcaaggccactcaggagtggctagagaagcaggcccagctggagaaggagctcagcgcagccctgcaggacaagaaatgccttgaagagaagaacgaaatccttcagggaaaactttcacagctggaagaacacttgtcccagctgcaggataacccaccccaggagaagggcgaggtgctgggtgatgtcttgcagctggaaaccttgaagcaagaggcagccactcttgctgcaaacaacacacagctccaagccagggtagagatgctggagactgagcgaggccagcaggaagccaagctgcttgctgagcggggccacttcgaagaagaaaagcagcagctgtctagcctgatcactgacctgcagagctccatctccaacctcagccaggccaaggaagagctggagcaggcctcccaggctcatggggcccggttgactgcccaggtggcctctctgacctctgagctcaccacactcaatgccaccatccagcaacaggatcaagaactggctggcctgaagcagcaggccaaagagaagcaggcccagctagcacagaccctccaacagcaagaacaggcctcccagggcctccgccaccaggtggagcagctaagcagtagcctgaagcagaaggagcagcagttgaaggaggtagcggagaagcaggaggcaactaggcaggaccatgcccagcaactggccactgctgcagaggagcgagaggcctccttaagggagcgggatgcggctctcaagcagctggaggcactggagaaggagaaggctgccaagctggagattctgcagcagcaacttcaggtggctaatgaagcccgggacagtgcccagacctcagtgacacaggcccagcgggagaaggcagagctgagccggaaggtggaggaactccaggcctgtgttgagacagcccgccaggaacagcatgaggcccaggcccaggttgcagagctagagttgcagctgcggtctgagcagcaaaaagcaactgagaaagaaagggtggcccaggagaaggaccagctccaggagcagctccaggccctcaaagagtccttgaaggtcaccaagggcagccttgaagaggagaagcgcagggctgcagatgccctggaagagcagcagcgttgtatctctgagctgaaggcagagacccgaagcctggtggagcagcataagcgggaacgaaaggagctggaagaagagagggctgggcgcaaggggctggaggctcgattacagcagcttggggaggcccatcaggctgagactgaagtcctgcggcgggagctggcagaggccatggctgcccagcacacagctgagagtgagtgtgagcagctcgtcaaagaagtagctgcctggcgtgagcggtatgaggatagccagcaagaggaggcacagtatggcgccatgttccaggaacagctgatgactttgaaggaggaatgtgagaaggcccgccaggagctgcaggaggcaaaggagaaggtggcaggcatagaatcccacagcgagctccagataagccggcagcagaacgaactagctgagctccatgccaacctggccagagcactccagcaggtccaagagaaggaagtcagggcccagaagcttgcagatgacctctccactctgcaggaaaagatggctgccaccagcaaagaggtggcccgcttggagaccttggtgcgcaaggcaggtgagcagcaggaaacagcctcccgggagttagtcaaggagcctgcgagggcaggagacagacagcccgagtggctggaagagcaacagggacgccagttctgcagcacacaggcagcgctgcaggctatggagcgggaggcagagcagatgggcaatgagctggaacggctgcgggccgcgctgatggagagccaggggcagcagcaggaggagcgtgggcagcaggaaagggaggtggcgcggctgacccaggagcggggccgtgcccaggctgaccttgccctggagaaggcggccagagcagagcttgagatgcggctgcagaacgccctcaacgagcagcgtgtggagttcgctaccctgcaagaggcactggctcatgccctgacggaaaaggaaggcaaggaccaggagttggccaagcttcgtggtctggaggcagcccagataaaagagctggaggaacttcggcaaaccgtgaagcaactgaaggaacagctggctaagaaagaaaaggagcacgcatctggctcaggagcccaatctgaggctgctggcaggacagagccaacaggccccaagctggaggcactgcgggcagaggtgagcaagctggaacagcaatgccagaagcagcaggagcaggctgacagcctggaacgcagcctcgaggctgagcgggcctcccgggctgagcgggacagtgctctggagactctgcagggccagttagaggagaaggcccaggagctagggcacagtcagagtgccttagcctcggcccaacgggagttggctgccttccgcaccaaggtacaagaccacagcaaggctgaagatgagtggaaggcccaggtggcccggggccggcaagaggctgagaggaaaaatagcctcatcagcagcttggaggaggaggtgtccatcctgaatcgccaggtcctggagaaggagggggagagcaaggagttgaagcggctggtgatggccgagtcagagaagagccagaagctggaggagaggctgcgcctgctgcaggcagagacagccagcaacagtgccagagctgcagaacgcagctctgctctgcgggaggaggtgcagagcctccgggaggaggctgagaaacagcgggtggcttcagagaacctgcggcaggagctgacctcacaggctgagcgtgcggaggagctgggccaagaattgaaggcgtggcaggagaagttcttccagaaagagcaggccctctccaccctgcagctcgagcacaccagcacacaggccctggtgagtgagctgctgccagctaagcacctctgccagcagctgcaggccgagcaggccgctgccgagaaacgccaccgtgaggagctggagcagagcaagcaggccgctgggggactgcgggcagagctgctgcgggcccagcgggagcttggggagctgattcctctgcggcagaaggtggcagagcaggagcgaacagctcagcagctgcgggcagagaaggccagctatgcagagcagctgagcatgctgaagaaggcgcatggcctgctggcagaggagaaccgggggctgggtgagcgggccaaccttggccggcagtttctggaagtggagttggaccaggcccgggagaagtatgtccaagagttggcagccgtacgtgctgatgctgagacccgtctggctgaggtgcagcgagaagcacagagcactgcccgggagctggaggtgatgactgccaagtatgagggtgccaaggtcaaggtcctggaggagaggcagcggttccaggaagagaggcagaaactcactgcccaggtggagcagctagaggtatttcagagagagcaaactaagcaggtggaagaactgagtaagaaactggctgactctgaccaagccagcaaggtgcagcagcagaagctgaaggctgtccaggctcagggaggcgagagccagcaggaggcccagcgcctccaggcccagctgaatgaactgcaagcccagttgagccagaaggagcaggcagctgagcactataagctgcagatggagaaagccaaaacacattatgatgccaagaagcagcagaaccaagagctgcaggagcagctgcggagcctggagcagctgcagaaggaaaacaaagagctgcgagctgaagctgaacggctgggccatgagctacagcaggctgggctgaagaccaaggaggctgaacagacctgccgccaccttactgcccaggtgcgcagcctggaggcacaggttgcccatgcagaccagcagcttcgagacctgggcaaattccaggtggcaactgatgctttaaagagccgtgagccccaggctaagccccagctggacttgagtattgacagcctggatctgagctgcgaggaggggaccccactcagtatcaccagcaagctgcctcgtacccagccagacggcaccagcgtccctggagaaccagcctcacctatctcccagcgcctgccccccaaggtagaatccctggagagtctctacttcactcccatccctgctcggagtcaggcccccctggagagcagcctggactccctgggagacgtcttcctggactcgggtcgtaagacccgctccgctcgtcggcgcaccacgcagatcatcaacatcaccatgaccaagaagctagatgtggaagagccagacagcgccaactcatcgttctacagcacgcggtctgctcctgcttcccaggctagcctgcgagccacctcctctactcagtctctagctcgcctgggttctcccgattatggcaactcagccctgctcagcttgcctggctaccgccccaccactcgcagttctgctcgtcgttcccaggccggggtgtccagtggggcccctccaggaaggaacagcttctacatgggcacttgccaggatgagcctgagcagctggatgactggaaccgcattgcagagctgcagcagcgcaatcgagtgtgccccccacatctgaagacctgctatcccctggagtccaggccttccctgagcctgggcaccatcacagatgaggagatgaaaactggagacccccaagagaccctgcgccgagccagcatgcagccaatccagatagccgagggcactggcatcaccacccggcagcagcgcaaacgggtctccctagagccccaccagggccctggaactcctgagtctaagaaggccaccagctgtttcccacgccccatgactccccgagaccgacatgaagggcgcaaacagagcactactgaggcccagaagaaagcagctccagcttctactaaacaggctgaccggcgccagtcgatggccttcagcatcctcaacacacccaagaagctagggaacagccttctgcggcggggagcctcaaagaaggccctgtccaaggcttcccccaacactcgcagtggaacccgccgttctccgcgcattgccaccaccacagccagcgccgccactgctgccgccattggtgccacccctcgagccaagggcaaggcaaagcactaaagggccagtaccagtgagtggccccacctgtgtccccgatgctgacctcacctggtcctccgcctactgtccctctcagtgccttctctcagctcccaggccaacagtagccaaacccctagagacagtgatgcctgcccgcaccctggcctggtccctggtccttcactggcgccttctcggagctggcccagggggcctggagcatggacagtgtgggcgctctccctaccttgcctccttttttcttaaagcaaagtcacttctccatcacaaccagatttgaggctggttttgatggctgggtccttgggcctggccagtcttcctcttagcctctggatctagaagggaccataagaggagtaggccctggttcctgctgtcctggtggctgggcccagcaggggccctcactcttgaagtccaggactgggtctgacctggtgggagcacctgccagaggatgctctttcccaggacggatgggccctatgtctcaggagtggggttgggggacagccttcagcagcagctcacaccctaccttccccagacttgcactggggtgggatttggagtgatgggaaggtttttaagggccggggatggatcttttctaaatgttattacttgtaaataaagtctatttttctcccgtgaaaaaaaaaaaaaaaaaaaaaaaaaaa

SEQ ID NO: 152 - DNA, 3886 bp, Homo sapiens
cgggagcgcgcagccaggtaaccggcgcgggcccgcgtttggcgtgcggcctgggcacccctgcgggtgctcaggcctaaaaggggtgctggagaggccgctgcgagcggaaggcctcctccataaccgagtccgaaagggcagaatctatgggggtggaaactaattctaagccagactgctggagatcaccctgttctagtgtgtggaggcttccaccaggaggcgcattggagtgactgtctggcatcaccaagatgacactccacgccacccggggggctgcactcctctcttgggtgaacagtctacacgtggctgaccctgtggaggctgtgctgcagctccaggactgcagcatcttcatcaagatcattgacagaatccatggcactgaagagggacagcaaatcttgaagcagccggtgtcagagagactggactttgtgtgcagttttctgcagaaaaatcgaaaacatccctcttccccagaatgcctggtatctgcacagaaggtgctagagggatcagagctggaactggcgaagatgaccatgctgctcttataccactctaccatgagctccaaaagtcccagggactgggaacagtttgaatataaaattcaggctgagttggctgtcattcttaaatttgtgctggaccatgaggacgggctaaaccttaatgaggacctagagaacttcctacagaaagctcctgtgccttctacctgttctagcacattccctgaagagctctccccacctagccaccaggccaagagggagattcgcttcctagagctacagaaggttgcctcctcttccagtgggaacaactttctctcaggttctccagcttctcccatgggtgatatcctgcagaccccacagttccagatgagacggctgaagaagcagcttgctgatgagagaagtaatagggatgagctggagctggagctagctgagaaccgcaagctcctcaccgagaaggatgcacagatagccatgatgcagcagcgcattgaccgcctagccctgctgaatgagaagcaggcggccagcccactggagcccaaggagcttgaggagctgcgtgacaagaatgagagccttaccatgcggctgcatgaaaccctgaagcagtgccaggacctgaagacagagaagagccagatggatcgcaaaatcaaccagctttcggaggagaatggagacctttcctttaagctgcgggagtttgccagtcatctgcagcagctacaggatgccctcaatgagctgacggaggagcacagcaaggccactcaggagtggctagagaagcaggcccagctggagaaggagctcagcgcagccctgcaggacaagaaatgccttgaagagaagaacgaaatccttcagggaaaactttcacagctggaagaacacttgtcccagctgcaggataacccaccccaggagaagggcgaggtgctgggtgatgtcttgcaggtggaagaactgagtaagaaactggctgactctgaccaagccagcaaggtgcagcagcagaagctgaaggctgtccaggctcagggaggcgagagccagcaggaggcccagcgcctccaggcccagctgaatgaactgcaagcccagttgagccagaaggagcaggcagctgagcactataagctgcagatggagaaagccaaaacacattatgatgccaagaagcagcagaaccaagagctgcaggagcagctgcggagcctggagcagctgcagaaggaaaacaaagagctgcgagctgaagctgaacggctgggccatgagctacagcaggctgggctgaagaccaaggaggctgaacagacctgccgccaccttactgcccaggtgcgcagcctggaggcacaggttgcccatgcagaccagcagcttcgagacctgggcaaattccaggtggcaactgatgctttaaagagccgtgagccccaggctaagccccagctggacttgagtattgacagcctggatctgagctgcgaggaggggaccccactcagtatcaccagcaagctgcctcgtacccagccagacggcaccagcgtccctggagaaccagcctcacctatctcccagcgcctgccccccaaggtagaatccctggagagtctctacttcactcccatccctgctcggagtcaggcccccctggagagcagcctggactccctgggagacgtcttcctggactcgggtcgtaagacccgctccgctcgtcggcgcaccacgcagatcatcaacatcaccatgaccaagaagctagatgtggaagagccagacagcgccaactcatcgttctacagcacgcggtctgctcctgcttcccaggctagcctgcgagccacctcctctactcagtctctagctcgcctgggttctcccgattatggcaactcagccctgctcagcttgcctggctaccgccccaccactcgcagttctgctcgtcgttcccaggccggggtgtccagtggggcccctccaggaaggaacagcttctacatgggcacttgccaggatgagcctgagcagctggatgactggaaccgcattgcagagctgcagcagcgcaatcgagtgtgccccccacatctgaagacctgctatcccctggagtccaggccttccctgagcctgggcaccatcacagatgaggagatgaaaactggagacccccaagagaccctgcgccgagccagcatgcagccaatccagatagccgagggcactggcatcaccacccggcagcagcgcaaacgggtctccctagagccccaccagggccctggaactcctgagtctaagaaggccaccagctgtttcccacgccccatgactccccgagaccgacatgaagggcgcaaacagagcactactgaggcccagaagaaagcagctccagcttctactaaacaggctgaccggcgccagtcgatggccttcagcatcctcaacacacccaagaagctagggaacagccttctgcggcggggagcctcaaagaaggccctgtccaaggcttcccccaacactcgcagtggaacccgccgttctccgcgcattgccaccaccacagccagcgccgccactgctgccgccattggtgccacccctcgagccaagggcaaggcaaagcactaaagggccagtaccagtgagtggccccacctgtgtccccgatgctgacctcacctggtcctccgcctactgtccctctcagtgccttctctcagctcccaggccaacagtagccaaacccctagagacagtgatgcctgcccgcaccctggcctggtccctggtccttcactggcgccttctcggagctggcccagggggcctggagcatggacagtgtgggcgctctccctaccttgcctccttttttcttaaagcaaagtcacttctccatcacaaccagatttgaggctggttttgatggctgggtccttgggcctggccagtcttcctcttagcctctggatctagaagggaccataagaggagtaggccctggttcctgctgtcctggtggctgggcccagcaggggccctcactcttgaagtccaggactgggtctgacctggtgggagcacctgccagaggatgctctttcccaggacggatgggccctatgtctcaggagtggggttgggggacagccttcagcagcagctcacaccctaccttccccagacttgcactggggtgggatttggagtgatgggaaggtttttaagggccggggatggatcttttctaaatgttattacttgtaaataaagtctatttttctcccgtgaaaaaaaaaaaaaaaaaaaaaaaaaaa

SEQ ID NO: 153 - DNA, 4687 bp, Homo sapiens
gttcccgggagcccggggctggccgggcgggagggctggcagcggggcgggcggcggcggcggcctctgggcagtagagggggctccggggctgagtccgcgtcgacgccggccgcggaggcggcaccatgggcaaggggtagaggggcaagttggccaccgccgccgccgggggtggtgggagagccgctccgggggcgggggccggtgggggagggaggggcgggcagccgcgccgccgcggcacttttttaattttttcgggtgccgcagcggcgacccctcggcgccgatgtccctgatccctggagcgacgacggccgctgcctaagctggaaagaggaatgccagctcctgagcaggcctcattggtggaggaggggcaaccacagacccgccaggaagctgcctccactggcccaggcatggaacccgagaccacagccaccactattctagcatccgtgaaggagcaggagcttcagtttcagcgactcacccgagaactggaagtggaaaggcagattgttgccagtcagctagaaagatgtaggcttggagcagaatcaccaagcatcgccagcaccagctcaactgagaagtcatttccttggagatcaacagacgtgccaaatactggtgtaagcaaacctagagtttctgacgctgtccagcccaacaactatctcatcaggacagagccagaacaaggaaccctctattcaccagaacagacatctctccatgaaagtgagggatcattgggtaactcaagaagttcaacacaaatgaattcttattccgacagtggataccaggaagcagggagtttccacaacagccagaacgtgagcaaggcagacaacagacagcagcattcattcataggatcaactaacaaccatgtggtgaggaattcaagagctgaaggacaaacactggttcagccatcagtagccaatcgggccatgagaagagttagttcagttccatctagagcacagtctccttcttatgttatcagcacaggcgtgtctccttcaagggggtctctgagaacttctctgggtagtggatttggctctccgtcagtgaccgacccccgacctctgaaccccagtgcatattcctccaccacattacctgctgcacgggcagcctctccgtactcacagagacccgcctccccaacagctatacggcggattgggtcagtcacctcccggcagacctccaatcccaacggaccaacccctcaataccaaaccaccgccagagtggggtccccactgaccctgacggatgcacagactcgagtagcttccccatcccaaggccaggtggggtcgtcgtcccccaaacgctcagggatgaccgccgtaccacagcatctgggaccttcactgcaaaggactgttcatgacatggagcaattcggacagcagcagtatgacatttatgagaggatggttccacccaggccagacagcctgacaggcttacggagttcctatgctagtcagcatagtcagcttgggcaagaccttcgttctgccgtgtctcccgacttgcacattactcctatatatgaggggaggacctattacagcccagtgtaccgcagcccaaaccatggaactgtggagctccaaggatcgcagacggcgttgtatcgcacaggttcaggtattggaaatctacaaaggacatccagccaacgaagtacccttacataccaaagaaataattatgctctgaacacaacagctacctacgcggagccctacaggcctatacaataccgagtgcaagagtgcaattataacaggcttcagcatgcagtgccggctgatgatggcaccacaagatccccatcaatagacagcattcagaaggaccccagggagtttgcctggcgtgatcctgagttgcctgaggtcattcacatgcttcagcaccagttcccatctgttcaggcaaatgcagcggcctacctgcagcacctgtgctttggtgacaacaaagtgaagatggaggtgtgtaggttagggggaatcaagcatctggttgaccttctggaccacagagttttggaagttcagaagaatgcttgtggtgcccttcgaaacctcgtttttggcaagtctacagatgaaaataaaatagcaatgaagaatgttggtgggatacctgccttgttgcgactgttgagaaaatctattgatgcagaagtaagggagcttgttacaggagttctttggaatttatcctcatgtgatgctgtaaaaatgacaatcattcgagatgctctctcaaccttaacaaacactgtgattgttccacattctggatggaataactcttcttttgatgatgatcataaaattaaatttcagacttcactagttctgcgtaacacgacaggttgcctaaggaacctcagctccgcgggggaagaagctcggaagcaaatgcggtcctgcgaggggctggtagactcactgttgtatgtgatccacacgtgtgtgaacacatccgattacgacagcaagacggtggagaactgcgtgtgcaccctgaggaacctgtcctatcggctggagctggaggtgccccaggcccggttactgggactgaacgaattggatgacttactaggaaaagagtctcccagcaaagactctgagccaagttgctgggggaagaagaagaaaaagaaaaagaggactccgcaagaagatcaatgggatggagttggtcctatcccaggactgtcgaagtcccccaaaggggttgagatgctgtggcacccatcggtggtaaaaccatatctgactcttctagcagaaagttccaacccagccaccttggaaggctctgcagggtctctccagaacctctctgctggcaactggaagtttgcagcatatatccgggcggccgtccgaaaagaaaaggggctccccatccttgtggagcttctgagaatggataacgatagagttgtttcttccgtggcaacagccttgaggaatatggcactagatgttcgcaacaaggagctcataggcaaatacgccatgcgagacctggtcaaccggctccccggcggcaatggccccagtgtcttgtctgatgagaccatggcagccatctgctgtgctctgcacgaggtcaccagcaaaaacatggagaacgcaaaagccctggccgactcaggaggcatagagaagctggtgaacataaccaaaggcaggggcgacagatcatctctgaaagtggtgaaggcagcagcccaggtcttgaatacattatggcaatatcgggacctccggagcatttataaaaaggatgggtggaatcagaaccattttattacacctgtgtcgacattggagcgagaccgattcaaatcacatccttccttgtctaccaccaaccaacagatgtcacccatcattcagtcagtcggcagcacctcttcctcaccagcactgttaggaatcagagaccctcgctctgaatacgataggacccagccacctatgcagtattacaatagccaaggggatgccacacataaaggcctgtaccctggctccagcaaaccttcaccaatttacatcagttcctattcctcaccagcaagagaacaaaatagacggctacagcatcaacagctgtattatagtcaagatgactccaacagaaagaactttgatgcatacagattgtatttgcagtctcctcatagctatgaagatccttattttgatgaccgagttcactttccagcttctactgattactcaacacagtatggactgaaatcgaccacaaattatgtagacttttattccactaaacgaccttcttatagagcagaacagtacccagggtccccagactcatgggtgtagcatcaagatgcccaacagaggaactctttctttctaaccttgttcagattgaggtgaaaagtccatcttgctgatttgatgattgaaatgtgaaagtgaagtggaaggaatgaatgaagtgtgttttttttttcttttttgaggaattatcagggaagtgaggaaatgtttgggagaggactttctaagctctatttaggtgttagatctaattacttatagattctgtagtctggtgaaggtgtgggtgacgtgatgagaggtttgagaaatgggtgaaatgaaatgggggatatgtaggtcaaatcaaattaaagatgatttttttaatgtgaataaagttatgttctgatagtttgtacagaaaaaataaaatggatgcccatgttttattgctattactaaatgtcaagattgtatgctattatgtcttgtaaatttcttttgttggtgtaaatatggaaatgccacattggttaagtgccatcatttgtaatgcaatgtgtcacttgaaaagagatttgaagaaactgacaacttcaaaaacaaatgagaagcccaaggaactgtgagcaattaaaagcaaaccgcgacaccctttgtctccaccacacatagtgtactttggaagcacaacgtccaggctggtaccgcagcgccatgcccattcctcgcctcgttcataggacacttcactgccattttctattcacataaaagaaaaataaatgtggaaatttcatccttggaaaaaaaaaaaaaaaaaa

SEQ ID NO: 154 - DNA, 4610 bp, Homo sapiens
gttcccgggagcccggggctggccgggcgggagggctggcagcggggcgggcggcggcggcggcctctgggcagtagagggggctccggggctgagtccgcgtcgacgccggccgcggaggcggcaccatgggcaaggggtagaggggcaagttggccaccgccgccgccgggggtggtgggagagccgctccgggggcgggggccggtgggggagggaggggcgggcagccgcgccgccgcggcacttttttaattttttcgggtgccgcagcggcgacccctcggcgccgatgtccctgatccctggagcgacgacggccgctgcctaagctggaaagaggaatgccagctcctgagcaggcctcattggtggaggaggggcaaccacagacccgccaggaagctgcctccactggcccaggcatggaacccgagaccacagccaccactattctagcatccgtgaaggagcaggagcttcagtttcagcgactcacccgagaactggaagtggaaaggcagattgttgccagtcagctagaaagatgtaggcttggagcagaatcaccaagcatcgccagcaccagctcaactgagaagtcatttccttggagatcaacagacgtgccaaatactggtgtaagcaaacctagagtttctgacgctgtccagcccaacaactatctcatcaggacagagccagaacaaggaaccctctattcaccagaacagacatctctccatgaaagtgagggatcattgggtaactcaagaagttcaacacaaatgaattcttattccgacagtggataccaggaagcagggagtttccacaacagccagaacgtgagcaaggcagacaacagacagcagcattcattcataggatcaactaacaaccatgtggtgaggaattcaagagctgaaggacaaacactggttcagcacaggcgtgtctccttcaagggggtctctgagaacttctctgggtagtggatttggctctccgtcagtgaccgacccccgacctctgaaccccagtgcatattcctccaccacattacctgctgcacgggcagcctctccgtactcacagagacccgcctccccaacagctatacggcggattgggtcagtcacctcccggcagacctccaatcccaacggaccaacccctcaataccaaaccaccgccagagtggggtccccactgaccctgacggatgcacagactcgagtagcttccccatcccaaggccaggtggggtcgtcgtcccccaaacgctcagggatgaccgccgtaccacagcatctgggaccttcactgcaaaggactgttcatgacatggagcaattcggacagcagcagtatgacatttatgagaggatggttccacccaggccagacagcctgacaggcttacggagttcctatgctagtcagcatagtcagcttgggcaagaccttcgttctgccgtgtctcccgacttgcacattactcctatatatgaggggaggacctattacagcccagtgtaccgcagcccaaaccatggaactgtggagctccaaggatcgcagacggcgttgtatcgcacaggttcaggtattggaaatctacaaaggacatccagccaacgaagtacccttacataccaaagaaataattatgctctgaacacaacagctacctacgcggagccctacaggcctatacaataccgagtgcaagagtgcaattataacaggcttcagcatgcagtgccggctgatgatggcaccacaagatccccatcaatagacagcattcagaaggaccccagggagtttgcctggcgtgatcctgagttgcctgaggtcattcacatgcttcagcaccagttcccatctgttcaggcaaatgcagcggcctacctgcagcacctgtgctttggtgacaacaaagtgaagatggaggtgtgtaggttagggggaatcaagcatctggttgaccttctggaccacagagttttggaagttcagaagaatgcttgtggtgcccttcgaaacctcgtttttggcaagtctacagatgaaaataaaatagcaatgaagaatgttggtgggatacctgccttgttgcgactgttgagaaaatctattgatgcagaagtaagggagcttgttacaggagttctttggaatttatcctcatgtgatgctgtaaaaatgacaatcattcgagatgctctctcaaccttaacaaacactgtgattgttccacattctggatggaataactcttcttttgatgatgatcataaaattaaatttcagacttcactagttctgcgtaacacgacaggttgcctaaggaacctcagctccgcgggggaagaagctcggaagcaaatgcggtcctgcgaggggctggtagactcactgttgtatgtgatccacacgtgtgtgaacacatccgattacgacagcaagacggtggagaactgcgtgtgcaccctgaggaacctgtcctatcggctggagctggaggtgccccaggcccggttactgggactgaacgaattggatgacttactaggaaaagagtctcccagcaaagactctgagccaagttgctgggggaagaagaagaaaaagaaaaagaggactccgcaagaagatcaatgggatggagttggtcctatcccaggactgtcgaagtcccccaaaggggttgagatgctgtggcacccatcggtggtaaaaccatatctgactcttctagcagaaagttccaacccagccaccttggaaggctctgcagggtctctccagaacctctctgctggcaactggaagtttgcagcatatatccgggcggccgtccgaaaagaaaaggggctccccatccttgtggagcttctgagaatggataacgatagagttgtttcttccgtggcaacagccttgaggaatatggcactagatgttcgcaacaaggagctcataggcaaatacgccatgcgagacctggtcaaccggctccccggcggcaatggccccagtgtcttgtctgatgagaccatggcagccatctgctgtgctctgcacgaggtcaccagcaaaaacatggagaacgcaaaagccctggccgactcaggaggcatagagaagctggtgaacataaccaaaggcaggggcgacagatcatctctgaaagtggtgaaggcagcagcccaggtcttgaatacattatggcaatatcgggacctccggagcatttataaaaaggatgggtggaatcagaaccattttattacacctgtgtcgacattggagcgagaccgattcaaatcacatccttccttgtctaccaccaaccaacagatgtcacccatcattcagtcagtcggcagcacctcttcctcaccagcactgttaggaatcagagaccctcgctctgaatacgataggacccagccacctatgcagtattacaatagccaaggggatgccacacataaaggcctgtaccctggctccagcaaaccttcaccaatttacatcagttcctattcctcaccagcaagagaacaaaatagacggctacagcatcaacagctgtattatagtcaagatgactccaacagaaagaactttgatgcatacagattgtatttgcagtctcctcatagctatgaagatccttattttgatgaccgagttcactttccagcttctactgattactcaacacagtatggactgaaatcgaccacaaattatgtagacttttattccactaaacgaccttcttatagagcagaacagtacccagggtccccagactcatgggtgtagcatcaagatgcccaacagaggaactctttctttctaaccttgttcagattgaggtgaaaagtccatcttgctgatttgatgattgaaatgtgaaagtgaagtggaaggaatgaatgaagtgtgttttttttttcttttttgaggaattatcagggaagtgaggaaatgtttgggagaggactttctaagctctatttaggtgttagatctaattacttatagattctgtagtctggtgaaggtgtgggtgacgtgatgagaggtttgagaaatgggtgaaatgaaatgggggatatgtaggtcaaatcaaattaaagatgatttttttaatgtgaataaagttatgttctgatagtttgtacagaaaaaataaaatggatgcccatgttttattgctattactaaatgtcaagattgtatgctattatgtcttgtaaatttcttttgttggtgtaaatatggaaatgccacattggttaagtgccatcatttgtaatgcaatgtgtcacttgaaaagagatttgaagaaactgacaacttcaaaaacaaatgagaagcccaaggaactgtgagcaattaaaagcaaaccgcgacaccctttgtctccaccacacatagtgtactttggaagcacaacgtccaggctggtaccgcagcgccatgcccattcctcgcctcgttcataggacacttcactgccattttctattcacataaaagaaaaataaatgtggaaatttcatccttggaaaaaaaaaaaaaaaaaa

SEQ ID NO: 155 - DNA, 3184 bp, Homo sapiens
gttcccgggagcccggggctggccgggcgggagggctggcagcggggcgggcggcggcggcggcctctgggcagtagagggggctccggggctgagtccgcgtcgacgccggccgcggaggcggcaccatgggcaaggggtagaggggcaagttggccaccgccgccgccgggggtggtgggagagccgctccgggggcgggggccggtgggggagggaggggcgggcagccgcgccgccgcggcacttttttaattttttcgggtgccgcagcggcgacccctcggcgccgatgtccctgatccctggagcgacgacggccgctgcctaagctggaaagaggaatgccagctcctgagcaggcctcattggtggaggaggggcaaccacagacccgccaggaagctgcctccactggcccaggcatggaacccgagaccacagccaccactattctagcatccgtgaaggagcaggagcttcagtttcagcgactcacccgagaactggaagtggaaaggcagattgttgccagtcagctagaaagatgtaggcttggagcagaatcaccaagcatcgccagcaccagctcaactgagaagtcatttccttggagatcaacagacgtgccaaatactggtgtaagcaaacctagagtttctgacgctgtccagcccaacaactatctcatcaggacagagccagaacaaggaaccctctattcaccagaacagacatctctccatgaaagtgagggatcattgggtaactcaagaagttcaacacaaatgaattcttattccgacagtggataccaggaagcagggagtttccacaacagccagaacgtgagcaaggcagacaacagacagcagcattcattcataggatcaactaacaaccatgtggtgaggaattcaagagctgaaggacaaacactggttcagccatcagtagccaatcgggccatgagaagagttagttcagttccatctagagcacagtctccttcttatgttatcagcacaggcgtgtctccttcaagggggtctctgagaacttctctgggtagtggatttggctctccgtcagtgaccgacccccgacctctgaaccccagtgcatattcctccaccacattacctgctgcacgggcagcctctccgtactcacagagacccgcctccccaacagctatacggcggattgggtcagtcacctcccggcagacctccaatcccaacggaccaacccctcaataccaaaccaccgccagagtggggtccccactgaccctgacggatgcacagactcgagtagcttccccatcccaaggccaggtggggtcgtcgtcccccaaacgctcagggatgaccgccgtaccacagcatctgggaccttcactgcaaaggactgttcatgacatggagcaattcggacagcagcagtatgacatttatgagaggatggttccacccaggccagacagcctgacaggcttacggagttcctatgctagtcagcatagtcagcttgggcaagaccttcgttctgccgtgtctcccgacttgcacattactcctatatatgaggggaggacctattacagcccagtgtaccgcagcccaaaccatggaactgtggagctccaaggatcgcagacggcgttgtatcgcacaggttcagtaggtattggaaatctacaaaggacatccagccaacgaagtacccttacataccaaagaaataattatgctctgaacacaacagctacctacgcggagccctacaggcctatacaataccgagtgcaagagtgcaattataacaggcttcagcatgcagtgccggctgatgatggcaccacaagatccccatcaatagacagcattcagaaggaccccagggagtttgcctggcgtgatcctgagttgcctgaggtcattcacatgcttcagcaccagttcccatctgttcaggcaaatgcagcggcctacctgcagcacctgtgctttggtgacaacaaagtgaagatggaggtgtgtaggttagggggaatcaagcatctggttgaccttctggaccacagagttttggaagttcagaagaatgcttgtggtgcccttcgaaacctcgtttttggcaagtctacagatgaaaataaaatagcaatgaagaatgttggtgggatacctgccttgttgcgactgttgagaaaatctattgatgcagaagtaagggagcttgttacaggagttctttggaatttatcctcatgtgatgctgtaaaaatgacaatcattcgagatgctctctcaaccttaacaaacactgtgattgttccacattctggatggaataactcttcttttgatgatgatcataaaattaaatttcagacttcactagttctgcgtaacacgacaggttgcctaaggaacctcagctccgcgggggaagaagctcggaagcaaatgcggtcctgcgaggggctggtagactcactgttgtatgtgatccacacgtgtgtgaacacatccgattacgacagcaagacggtggagaactgcgtgtgcaccctgaggaacctgtcctatcggctggagctggaggtgccccaggcccggttactgggactgaacgaattggatgacttactaggaaaagagtctcccagcaaagactctgagccaagttgctgggggaagaagaagaaaaagaaaaagaggactccgcaagaagatcaatgggatggagttggtcctatcccaggactgtcgaagtcccccaaaggggttgagatgctgtggcacccatcggtggtaaaaccatatctgactcttctagcagaaagttccaacccagccaccttggaaggctctgcagggtctctccagaacctctctgctggcaactggaagtttgcagcatatatccgggcggccgtccgaaaagaaaaggggctccccatccttgtggagcttctgagaatggataacgatagagttgtttcttccgtggcaacagccttgaggaatatggcactagatgttcgcaacaaggagctcataggtatgttctggtgacaagatgagctgtaaatgtgagagcagctacaaaattcatgaaactcttcttttgattaataaatatatggcttgtaaaatcaaaaaaaaaaaaaaaa

SEQ ID NO: 156 - DNA, 4690 bp, Homo sapiens
gttcccgggagcccggggctggccgggcgggagggctggcagcggggcgggcggcggcggcggcctctgggcagtagagggggctccggggctgagtccgcgtcgacgccggccgcggaggcggcaccatgggcaaggggtagaggggcaagttggccaccgccgccgccgggggtggtgggagagccgctccgggggcgggggccggtgggggagggaggggcgggcagccgcgccgccgcggcacttttttaattttttcgggtgccgcagcggcgacccctcggcgccgatgtccctgatccctggagcgacgacggccgctgcctaagctggaaagaggaatgccagctcctgagcaggcctcattggtggaggaggggcaaccacagacccgccaggaagctgcctccactggcccaggcatggaacccgagaccacagccaccactattctagcatccgtgaaggagcaggagcttcagtttcagcgactcacccgagaactggaagtggaaaggcagattgttgccagtcagctagaaagatgtaggcttggagcagaatcaccaagcatcgccagcaccagctcaactgagaagtcatttccttggagatcaacagacgtgccaaatactggtgtaagcaaacctagagtttctgacgctgtccagcccaacaactatctcatcaggacagagccagaacaaggaaccctctattcaccagaacagacatctctccatgaaagtgagggatcattgggtaactcaagaagttcaacacaaatgaattcttattccgacagtggataccaggaagcagggagtttccacaacagccagaacgtgagcaaggcagacaacagacagcagcattcattcataggatcaactaacaaccatgtggtgaggaattcaagagctgaaggacaaacactggttcagccatcagtagccaatcgggccatgagaagagttagttcagttccatctagagcacagtctccttcttatgttatcagcacaggcgtgtctccttcaagggggtctctgagaacttctctgggtagtggatttggctctccgtcagtgaccgacccccgacctctgaaccccagtgcatattcctccaccacattacctgctgcacgggcagcctctccgtactcacagagacccgcctccccaacagctatacggcggattgggtcagtcacctcccggcagacctccaatcccaacggaccaacccctcaataccaaaccaccgccagagtggggtccccactgaccctgacggatgcacagactcgagtagcttccccatcccaaggccaggtggggtcgtcgtcccccaaacgctcagggatgaccgccgtaccacagcatctgggaccttcactgcaaaggactgttcatgacatggagcaattcggacagcagcagtatgacatttatgagaggatggttccacccaggccagacagcctgacaggcttacggagttcctatgctagtcagcatagtcagcttgggcaagaccttcgttctgccgtgtctcccgacttgcacattactcctatatatgaggggaggacctattacagcccagtgtaccgcagcccaaaccatggaactgtggagctccaaggatcgcagacggcgttgtatcgcacaggttcagtaggtattggaaatctacaaaggacatccagccaacgaagtacccttacataccaaagaaataattatgctctgaacacaacagctacctacgcggagccctacaggcctatacaataccgagtgcaagagtgcaattataacaggcttcagcatgcagtgccggctgatgatggcaccacaagatccccatcaatagacagcattcagaaggaccccagggagtttgcctggcgtgatcctgagttgcctgaggtcattcacatgcttcagcaccagttcccatctgttcaggcaaatgcagcggcctacctgcagcacctgtgctttggtgacaacaaagtgaagatggaggtgtgtaggttagggggaatcaagcatctggttgaccttctggaccacagagttttggaagttcagaagaatgcttgtggtgcccttcgaaacctcgtttttggcaagtctacagatgaaaataaaatagcaatgaagaatgttggtgggatacctgccttgttgcgactgttgagaaaatctattgatgcagaagtaagggagcttgttacaggagttctttggaatttatcctcatgtgatgctgtaaaaatgacaatcattcgagatgctctctcaaccttaacaaacactgtgattgttccacattctggatggaataactcttcttttgatgatgatcataaaattaaatttcagacttcactagttctgcgtaacacgacaggttgcctaaggaacctcagctccgcgggggaagaagctcggaagcaaatgcggtcctgcgaggggctggtagactcactgttgtatgtgatccacacgtgtgtgaacacatccgattacgacagcaagacggtggagaactgcgtgtgcaccctgaggaacctgtcctatcggctggagctggaggtgccccaggcccggttactgggactgaacgaattggatgacttactaggaaaagagtctcccagcaaagactctgagccaagttgctgggggaagaagaagaaaaagaaaaagaggactccgcaagaagatcaatgggatggagttggtcctatcccaggactgtcgaagtcccccaaaggggttgagatgctgtggcacccatcggtggtaaaaccatatctgactcttctagcagaaagttccaacccagccaccttggaaggctctgcagggtctctccagaacctctctgctggcaactggaagtttgcagcatatatccgggcggccgtccgaaaagaaaaggggctccccatccttgtggagcttctgagaatggataacgatagagttgtttcttccgtggcaacagccttgaggaatatggcactagatgttcgcaacaaggagctcataggcaaatacgccatgcgagacctggtcaaccggctccccggcggcaatggccccagtgtcttgtctgatgagaccatggcagccatctgctgtgctctgcacgaggtcaccagcaaaaacatggagaacgcaaaagccctggccgactcaggaggcatagagaagctggtgaacataaccaaaggcaggggcgacagatcatctctgaaagtggtgaaggcagcagcccaggtcttgaatacattatggcaatatcgggacctccggagcatttataaaaaggatgggtggaatcagaaccattttattacacctgtgtcgacattggagcgagaccgattcaaatcacatccttccttgtctaccaccaaccaacagatgtcacccatcattcagtcagtcggcagcacctcttcctcaccagcactgttaggaatcagagaccctcgctctgaatacgataggacccagccacctatgcagtattacaatagccaaggggatgccacacataaaggcctgtaccctggctccagcaaaccttcaccaatttacatcagttcctattcctcaccagcaagagaacaaaatagacggctacagcatcaacagctgtattatagtcaagatgactccaacagaaagaactttgatgcatacagattgtatttgcagtctcctcatagctatgaagatccttattttgatgaccgagttcactttccagcttctactgattactcaacacagtatggactgaaatcgaccacaaattatgtagacttttattccactaaacgaccttcttatagagcagaacagtacccagggtccccagactcatgggtgtagcatcaagatgcccaacagaggaactctttctttctaaccttgttcagattgaggtgaaaagtccatcttgctgatttgatgattgaaatgtgaaagtgaagtggaaggaatgaatgaagtgtgttttttttttcttttttgaggaattatcagggaagtgaggaaatgtttgggagaggactttctaagctctatttaggtgttagatctaattacttatagattctgtagtctggtgaaggtgtgggtgacgtgatgagaggtttgagaaatgggtgaaatgaaatgggggatatgtaggtcaaatcaaattaaagatgatttttttaatgtgaataaagttatgttctgatagtttgtacagaaaaaataaaatggatgcccatgttttattgctattactaaatgtcaagattgtatgctattatgtcttgtaaatttcttttgttggtgtaaatatggaaatgccacattggttaagtgccatcatttgtaatgcaatgtgtcacttgaaaagagatttgaagaaactgacaacttcaaaaacaaatgagaagcccaaggaactgtgagcaattaaaagcaaaccgcgacaccctttgtctccaccacacatagtgtactttggaagcacaacgtccaggctggtaccgcagcgccatgcccattcctcgcctcgttcataggacacttcactgccattttctattcacataaaagaaaaataaatgtggaaatttcatccttggaaaaaaaaaaaaaaaaaa

SEQ ID NO: 157 - DNA, 10049 bp, Homo sapiens
gcgccgcctccttcggcgttcgccccacggaccggcaggcggcggaccgcggcccaggctgaagctcagggccctgtctgctctgtggactcaacagtttgtggcaagacaagctcagaactgagaagctgtcaccacagttctggaggctgggaagttcaagatcaaagtgccagcagattcagtgtcatgtgaggacgtgcttcctgcttcatagataagagtagcttggagctcggcggcacaaccagcaccatctggtcgcgatggtggacacggaaagcccactctgccccctctccccactcgaggccggcgatctagagagcccgttatctgaagagttcctgcaagaaatgggaaacatccaagagatttcgcaatccatcggcgaggatagttctggaagctttggctttacggaataccagtatttaggaagctgtcctggctcagatggctcggtcatcacggacacgctttcaccagcttcgagcccctcctcggtgacttatcctgtggtccccggcagcgtggacgagtctcccagtggagcattgaacatcgaatgtagaatctgcggggacaaggcctcaggctatcattacggagtccacgcgtgtgaaggctgcaagggcttctttcggcgaacgattcgactcaagctggtgtatgacaagtgcgaccgcagctgcaagatccagaaaaagaacagaaacaaatgccagtattgtcgatttcacaagtgcctttctgtcgggatgtcacacaacgcgattcgttttggacgaatgccaagatctgagaaagcaaaactgaaagcagaaattcttacctgtgaacatgacatagaagattctgaaactgcagatctcaaatctctggccaagagaatctacgaggcctacttgaagaacttcaacatgaacaaggtcaaagcccgggtcatcctctcaggaaaggccagtaacaatccaccttttgtcatacatgatatggagacactgtgtatggctgagaagacgctggtggccaagctggtggccaatggcatccagaacaaggaggcggaggtccgcatctttcactgctgccagtgcacgtcagtggagaccgtcacggagctcacggaattcgccaaggccatcccaggcttcgcaaacttggacctgaacgatcaagtgacattgctaaaatacggagtttatgaggccatattcgccatgctgtcttctgtgatgaacaaagacgggatgctggtagcgtatggaaatgggtttataactcgtgaattcctaaaaagcctaaggaaaccgttctgtgatatcatggaacccaagtttgattttgccatgaagttcaatgcactggaactggatgacagtgatatctccctttttgtggctgctatcatttgctgtggagatcgtcctggccttctaaacgtaggacacattgaaaaaatgcaggagggtattgtacatgtgctcagactccacctgcagagcaaccacccggacgatatctttctcttcccaaaacttcttcaaaaaatggcagacctccggcagctggtgacggagcatgcgcagctggtgcagatcatcaagaagacggagtcggatgctgcgctgcacccgctactgcaggagatctacagggacatgtactgagttccttcagatcagccacaccttttccaggagttctgaagctgacagcactacaaaggagacgggggagcagcacgattttgcacaaatatccaccactttaaccttagagcttggacagtctgagctgtaggtaaccggcatattattccatatctttgttttaaccagtacttctaagagcatagaactcaaatgctgggggtaggtggctaatctcaggactgggaagattacggcgaattatgctcaatggtctgattttaactcacccgatgttaatcaatgcacattgctttagatcacattcgtgatttaccatttaattaactggtaacctcaaaattcgtggcctgtcttcccattcaccccgcttttgactattgtgctcctttataattctgaaaactaatcagcactttttaacaatgtttataatcctataagtctagatgtatccaaaggtgaagtatgtaaaaagcagcaaaatatttatttcaaagacttcacttctgtttcctgaatctaaagaaagacaacatgctgctttttaatcataggatggagaattttaaagaactgtttgggccaggcacagtcgctcatacttgtaatcccagcactttgggaggccgaggcgggtggatcacaaggtcagcagatcgagaccatcctggccaacatggtgaaaccctgtctctactaaaaatacaaaaattagccgggtgtggtggcacatgcctgtaatcccagctactcgggaagctgaggcaggagaattgcttgaaccagggagttggaggttgcagtgagctaagactgcaccactgcactccagcctggtgacagaacgagactctgtcttaaaaacaaacaaacaaaaaaaaaatctgttagataagctatcaaaatgcagctgttgttttgtttttggctcactgttttcgtggttgtaactaatatgtggaaaggcccatttccaggtttgcgtagaagagcccagaaaacagagtctcaagacccccgctctggactgtcataagctagcacccgtggtaagcgggacgagacaagctcccgaagcccgccagcttcctgctccactcagctccgtccagtcaacctgaacccacccagtccagctgtctgtgggaatggtggtgttcttagggacagactgacaccttacttgtcagtgttcctccgggccccatttggcagctcccgtatcttttgttatgttgcttttaaagatatgatgttttattgttttaactcttggtgacagtagatgctctctggagcgcagacgaggcacatgtgtcttcatagcctgggctgggtgggagccagtcaccctgcggatcgagagagggggtagagtcttcttcaaatggcagttttacttcaaatggcagatttcacaagagttggttattttttacaatggtttaggttgttaagtctcctttgtatgtaaggtagttttttcaacatctaaaatttttgttttagccttcaaaaccaacttaccaacctcagtccagctgggaaggcagcgttgattatggtagtttgtcaagaatatatggacctggaaacactttctctctctgtccacctggtagataaattgtcctgttgagaatttttagatctggactggaactgccaggaccaccgcctccagggagtcgctgggcacctggaggtatcgtcgatgcctctcccccatctttagaaaatttggctcttctgaggtcattattattttaagaatgattaggattgataagggtcccatgaccagcattatgaaaatgcgagagtgggaaggacacagtgtgagacttccactagaaaaaagtgaaagttagggttaggacatccttttttaaaaattacaaatttagtccgttttggtttttgtaatcaggctaggcacagtggctcacacatggaatcccagcactttgggaggccgaggtgggaggatcacttgagcccaggagttcgagaccagcctaggcaacatagcaagaccctgtctgtacacaaaatttaaaaattagttcatcggggtggcacacatcagtagtcccagctactctgcaggctgaggtgggaggattgcttgaacccaggaggtcgaggctgcagtgagctgtgatctcaccactgcattccagcctgggtgacagagttagattccaccctctcccaccccggcaaaaaaaaaaaaaaaagatgcaatcaaaggggctgttggccagcaatggcagcagcagcggcgggcagtctgcccaagtgtcttaggaaccaaaagcaaataaaagtgtttccatatatgccaccagccaagtggccatcctaattcagaaagaagctagcctttgagtgtctgtcatggtgcatccgtttcagtattatttcctaaaatgagaagcccctgtgtcaacaagatccaggggctggagcccaatgccaagcctgtgttgtccccagcgaccctgcagctgctcgctctgatgtaccctgtgccattcaaggagatgtggtccaggaaagtgagcctcatggttttcagagaagtcattgttctgtttacattttcataaaacctgtttaaaatagctccccgtctcaggctttcagcagtaacagtgagctgactggcaagttcgatgttagctcccgggacactcagcagcgatggtgagcattttggtttccttaaggcccagcaagacttccagggacatctctggtgaagccagaatggagacacccgtgacctcaggctgaaagtcactcgacattggtctcttgtgttgatagggaaggaaatcaggcattcctatttctttaaataacaaaaccactaattgccactcaatgctggaatattttgggtcacctaatcatagatttctcagggcatcaatactcaaatataggctgattatgccccagttcaaatgggaactattaacagagtgcatttcttgcttgctgggtttcaacagacatcagccaaaagaacaaaagagatgtcaggacagattccaggagtgtcggagcacatgtgtggcacccgctccctctggcagcgaatgtaggaagtcgccaaatttacccactcttcaacaagtcattgtttaaacacggtttttcattttctcaacttttaatagcaaaaagtgccaaagtcctcagagacctaacagccttggtctaccgtgctgaccagggtgaaggcacggcgagggactcctcccagacgtgcctcttgtgtgccagctggctgtggctcgggagcagacgcaggcctctccattgtccaggggagcctggcggcgcatccctcctctcccacctcctggcacttccagctgggtgtcccacatgttggattccgtccccaccacacttccagagaccggagaactgtgcagggcctaaggccgtttggatgaattgtcaaaacaagatgcttccagttacagcggcaggagcgggactgggagcacgggctgacggctgctggtgcctttcttcccacctcgcttgcctgtttccgcttgacccttcctccagctccgatgagaagagtataaagcatcttcctaacgggtgtgtttgctatacgaacataatggacgtgaagtggggcagaaacccagaactcagcattcaaggatgcccaggagagctgtccctgttttaaagagctgtgttttgttttgtttcgcatttagagagcagacaaggcacccttctgctgcgctgatacgtttcttacactgggccattttagacccccagggaaacagccttcctggagcgttgtctggaggttccagggacagggcagcctcccagagccgagcaagagctcaaggtacaaatgagagatttgctataccgtgagaagtcaacaacttagccaccacttccccgcaatggaccatgtaacaaatacctcagcaggccctgcaaaaggccatgctagagctgaggcgcacagcctgtggcctctgtagttagggcaggtgggatggagactccttgagtgcacacacctgagcctgcccacacacaggggagcagcatctcgtatgacgtctggaaggaacttcggttgtgtaaagggagccttgaagatacgtgcaaaaggtgctaccccaatttggtgaaactgacattgggcacgtcttgggcttaggagaagcggccgatggtcccggcctgcagtgacaaacccccctccccgcaccgcccccagcaccccctctcctcttcacctcttcctgctggccacgaggaagccacttcctcagagagaccctaccagatgcggatggaaacagatgcaccaaagcaagccctgatgaaaccgcgacttcctaaggtctgtctcctctgaacttgcacctgggcctctctgtgtttggttccaagcacttcccacctcaaactcccattttcaaaccactgtatctctgcgcacatctgctacttaccagccgcatacatgatggagggttttttggtcctgatccagtggccacacctgtctttgaaatgtctcactgaactccagttttaaaatagattcattgcttcaacacagcaagcccaatgcacccagctaagactggcttgaccgacagcctggcctttggtggggggcttcctggggcctggggaaagctggccaccttcaacagctggtacctcttcaacagtgtggcctttcaaaatgcagatgccaccaggagaacatgcccacagctcaccacctatggatgccatggctctgggcagctttcaaagcaggttcctgtggtctcctcagctgtttgagggggtaacagcaaatcagcctccattttaaaatgaaaacaccagcctccagatgtagggcctgctgggtgttgctagccgctggtccccaggcacggtgcactttctccacctcctgcagcctccctgttgtttctagactcttgcacctggtgagtgcaaggataggtgacccaggggcctgcagccttgtcctcagctcccatctcctggactgccagcctcaccctctgcagttagcatggttggcctgatgcagggatcccgagggattactttttagaccttctttcacattcagaaaagtagtatagattcaggagaggcaagaaaattatgctgtccatagaagtcacccatgaagactgatgccaccacctgaaggctcatgattgttaaaaatgtccacgggaacctctcgtccacaggaggtttgtctcaacacttcccatttttacggcattggcattgccaagcatggggaagtatctgctcttctcatgttaaaagtggcccagcttttcttaactcagtccaagctgacttgtttagctgcactggaatttcttaccaaccaaatatttgcatcgagcaaagggggctgtgtgcacctccctaatggcagcgatgatggctgctgtcattcaagcccatcttcagacgtcacagtctggaagtgaaatgtccacaaacatctgtggcagaaaaggctatacggaccacccagttgtgctgcagctttacagagcaaggaagggttgtggcaaataaatgattaacctgcctcgactgtgctgagggcaacaaaggccatctcaccaaaggattattcgatgccattaaatcatcccgtgaccttcctgcttccgagtccatggcctttgcccagggcatgtactcccctgagaggccttctgcctagaaagatctatgactgggttccaaagttgaggcctaggtttttgctgggatttagatattttcaggcaccattttgacagcattcaggaaaacggttattgaccccatagactagggtaagaataaaggcaataaatttggtctgactcagaatataggagatccatatatttctctggaaaccacagtgtacactaaaatgtgaaattgaaggttttgttaaaaagaaaaagataatgagcttcatgctttgtttaattacataatgatttccattacgctatttctgtgaaatgcagcaggttcttaaacgttatttcagtggcatgggctggaagcttatcacaaaaagccatgtgtgtggccttatcagaacagaaagagacaggctggtgcccaaggctgctgcctgctccaccttttgccagctctggacatctgaggacgtcccggcagatctggaatggggccctcaactgaccatttgcttctcagaatttcagtttgagacatgagaggtataatcagttacttttctccccccagagaaacccttttgtgaggggagaggagctatggtatgtggttcagctgaaacacatacaactgcatccttttggagtcctttgccaacaaaaacagaccaacagaccagatggtgtccatgttcaatatcatgtcttgatggacgcagctgatgacctcaaatacttgagtggtctcatggctgttagatggattatttgaaaaaaaaaaaaaaaaaagagagaaaaaataattgatttttacatcagagatagcaaactaagacctggggaggggggtcagcttttattttattttattttttttaagtttgctagttgggtcaaatgtgaggaggagggagtctacctgccacctcttctcttgcccctcttctgcccacacatccagcatccaaaatccattcatttaatgaattgataaagtgccgtgcaaactggtgcacaaacaggcccccagtccacgcagcctggctcctaggaaaagtggtgaccgggcgtgggggggcatgccgcagccctgggacacagtcgggcaccttccccggacccccaggccttggctgtgcctcaagtcagagagggtcagccttcaggccccggagacgagtgactggccgatcatttcacaataaaatcactcacttttggcaacttcactttttttaaggcacagtcagttccttttctcatgtacctcacaaaagatgaagaccatgtagtactctttttggtaaagttacagtgttcatgttaaatatcacttttttctacattgtgtggtaaaaagaactacgttaatagctatatcttaaatactgtgatttgactttttgaaaaatatcctaatacaaatattttactaacttacaatcactcatttaataagaaacatttggattcttttgaaatcagtgttaattgactcatattcttaaaagcctggctcttgaccctattggaaacacaaaggaagctgaaatcaaacatctaaaatacactgcgtacacgtgtgcgtgcacacacacacacacacacacacacacacagctcttcatttctcctgagccatgcagaatttactttcaatgtggaaatctgttccctttaccacactgtatatgcacagagcacaagagaggctatctctagtcacttccaccagcgaggccttagactccgtattagaggccaccgatttcatacaacagtgtttcgctaaagacccttcactattcttgtttagtaaatagctgtctgctcttcagggaactgttacctatgggttattaccaaagaacgctggcaattggaaatgtcctgatggaaattctttgcacgtgccggttctctggcatcctccaggtggcccaacccaaagcagaaagcagaaaccacagaccccgtgagtctccccataccttgtttccaataacttggcaaaacttcttggtgcatattggttacaccctctgggattcataatgccattaggctaaaaccctaagagagagggttgacagaaacacacgcgagaatgaggcagatcccagagcaaggactgggcccagactctccacatgtgctctactagtgagtgccttatactctcagtattttggggcttacagcttcttatttgtgctaaaaaggtgcagttccaaagtaggaactgccacacaggccccagcatcctctctccaacttcatacctctctcctggtggggggagcgggcatccaggacctccggaatcaaggatgtgcagagaagagcgaaagtaatttttctagtcacatgaactgattggttccaggcaattagaaaatggctataaaataaccttaattttaaaaaaaaatcttgggtcttcgttttcctattaggagactgaactgaccacatgtattgatttatatcctgaatatatgggaacttctgtgtttgggatgtcctactgtaagactgatgaatgtacagagttaatttcagggtacagttttgccttaatggttttaaaaaataaactattttttaaaatttt

SEQ ID NO: 158 - DNA, 10074 bp, Homo sapiens
cagggatccttccatgaagactgaggcaggcggagctgctaagagcctgctgacatgacatcggccacagagtttgaaaatgtgggcaaccagccaccttacagcaggatcaatgcccgctgggacgccccagacgacgagctggataatgacaacagctcagccaggctctttgagaggtcccggataaaggccttggcagatgagcgggaagttgttcagaaaaagaccttcacgaaatgggtgaactcgcacctggctcgagtgtcctgccgcatcaccgatctctacaaggacctgcgggatgggcgcatgctcatcaagctgctggaggtgctctctggagagatgctgccaaagcccaccaaggggaagatgcgcatccactgcctggagaatgtggacaaggctctccagttcctcaaggagcagcgtgtacacctggagaacatgggctcccacgacattgtagatggcaaccaccgcctggtcctgggcctcatctggaccatcatcctccgcttccagattcaggacattgtggtccaaactcaggaaggtcgtgaaacacgctcagccaaggatgcgttgctgttgtggtgtcagatgaagacggcaggctaccctcatgttaatgtcaccaactttacctccagctggaaggatggcttggcctttaatgccctgatacacaagcaccggcccgacctgatcgactttgataagctgaaggactccaatgcccggcacaacctggagcacgcattcaatgtggctgagcgccagctgggcatcatcccgctcctcgaccccgaagatgtctttacggaaaaccctgatgagaaatccatcatcacctatgtggtggccttttaccactacttctccaagatgaaggtgctggcagtggagggcaagcgtgtcggcaaggttattgaccatgccattgagactgagaagatgattgaaaagtacagcgggctagcctcggacctgctcacctggatcgagcagaccatcactgtcctgaacagccgcaagtttgccaactcgctgacgggcgtccagcagcagctgcaggccttcagcacctaccgcaccgtggagaagccgcccaagtttcaagagaaggggaatctggaagttctactttttaccatccagtcccggatgagagccaacaatcagaaagtgtacacaccccacgatgggaaactagtgtctgacatcaacagggcctgggaaagcctggaggaagctgagtatcggcgggagctggccctgagaaatgagctcattcggcaggagaagctagagcaactggcccggcgctttgaccggaaggccgcaatgagagagacctggctcagtgaaaaccagcgcctcgtggcccaggataactttgggtatgacctggcagctgtggaggccgccaagaagaagcatgaggccatcgagaccgacacggctgcctacgaggagcgggtgagagccctggaggacctggctcaggagctggagaaagagaactaccatgaccagaagcgcatcacggcccgcaaggacaatatactgcgcctatggagctacctgcaggagctgctgcagtcccggcgccagaggctcgagaccaccctggcactgcagaagctcttccaggacatgctgcacagcatcgactggatggatgagatcaaggctcacctcttgtctgccgagtttgggaagcacttgttggaggttgaagacctgctacagaagcacaagttgatggaagctgacatcgccatccaaggggacaaagtgaaggccatcaccgcagccaccctgaagttcaccgaggggaaagggtaccagccttgtgacccccaggtcatccaggaccgcatcagccacttggagcagtgctttgaggagctgagcaacatggcagctgggcggaaggcccaactggagcagtccaaacgactctggaagttcttctgggagatggatgaggctgagagctggatcaaggagaaggagcagatctattcttccctggactatggcaaagacctgaccagtgtgctcatcttacagcgcaagcacaaggcctttgaggatgagctccgtgggctggatgctcacctggagcagatcttccaggaggctcatggcatggttgcgcgcaagcagtttgggcacccgcagatcgaggcccgcataaaggaggtgtcggcacagtgggaccagctgaaggacctggctgccttctgcaagaagaacctccaggatgctgagaactttttccagttccagggcgatgcggatgacctgaaggcttggctgcaagacgcccaccggctgctctctggtgaagatgtggggcaggacgaaggggccacgcgggccctggggaaaaagcacaaggacttcctggaggagctggaggagagccgtggggtgatggagcacctggagcagcaggcccagggattccccgaagagtttcgggattccccagatgtgacccatcggctgcaggccctgcgggagctctaccaacaggtggtggcccaggcggacctgcgtcagcagaggctgcaggaagccctggacctgtacacggtgttcggggagacagacgcctgtgagctgtggatgggagagaaggagaagtggctggccgagatggaaatgccagacaccctggaggacctggaggtcgtgcagcacaggttcgacatcctggaccaggagatgaagaccttgatgactcagattgatggtgtgaacctcgctgccaacagcttggtagagagtggccacccacgcagcagggaggtgaagcagtaccaggaccatctgaacaccaggtggcaggcatttcagaccctggtgtcggagcggcgggaggctgtggactcagccctccgagtgcacaactactgcgtagattgcgaggagaccagcaagtggatcacggacaagacaaaggtagtggagtccacaaaagacctggggcgggacctggcaggtatcatcgccatccagaggaagttgtcagggctggagcgtgacgtggccgccatccaggcccgtgtggatgccctggagcgtgagtcccagcagctgatggactcgcaccctgagcagaaggaggatattggtcagcggcaaaaacacttggaggagctgtggcagggcctgcagcaatccctgcagggccaggaggacttgctgggggaagtcagccagctgcaggccttcctgcaggatctggatgacttccaggcctggctctccatcacccagaaggctgtggcctctgaggacatgcccgaatccctcccagaggctgagcagctcctgcagcagcatgcaggtatcaaggatgagattgacgggcaccaagacagctaccagcgtgttaaggagtctggggagaaagtgatccaaggccagacggacccagagtatctgcttctgggccagcggctggagggcctggatactggctggaatgccctgggcaggatgtgggagagccgcagccacaccctcgctcagtgccttggcttccaggagttccagaaagatgccaagcaggctgaagccatcctcagcaaccaggaatacactctggctcacttggagcccccagactccctggaagctgcagaggctgggatccggaagtttgaggatttcttggggtctatggagaacaaccgggataaggtcttgagtcctgtggactctggaaacaagctggtagctgagggaaacctatactcagacaagatcaaggagaaggtgcagctgattgaggacaggcacaggaagaacaacgagaaggcccaggaggcctctgtcctactgagagacaacctggagctacagaacttcctccagaactgccaggagctcactctctggatcaacgacaagctgctgacatctcaggatgtctcctatgatgaagcacgaaaccttcacaataaatggctaaagcaccaggcgtttgtggcagagctggcttcccatgaagggtggctagagaacatcgatgcggaaggaaagcagctgatggatgagaagccccagtttacagccctggtgtcccaaaagctggaagccctgcaccggctctgggacgagctgcaggccaccacaaaggagaagacccagcacctctcggctgccaggagctccgacctgcgcttgcagacccatgctgacctcaacaagtggatcagcgccatggaggaccagctgcggtcagacgacccgggcaaggacctgaccagtgtcaatcggatgttggctaagctgaagcgagtggaggaccaagtgaatgtgcgaaaagaggagctgggggagctgtttgcccaggtgccttcaatgggagaggagggaggagatgcagacttgagcatcgagaagcggttcctggacctcctggaacccctaggaaggaggaagaagcagctggaatcatccagagccaagctgcagatcagccgggacttagaggatgagacgctttgggtggaggagaggctgcctctggcccagtcagccgactatggcactaatctgcaaactgtgcaactgttcatgaagaagaaccagacactgcagaatgagattctgggccatacgccgcgggttgaggatgtgctgcagagagggcagcagctggtggaggcggcggagatcgactgccaggaccttgaggagcgcctggggcacctgcagagctcctgggacaggctgcgggaggcagcggccgggaggctgcagcgactgagggacgccaacgaggcacagcagtactacctggatgcagacgaggctgaggcctggattggcgagcaggagctctacgtcatctccgatgagatccccaaggatgaagagggcgccattgtgatgctgaagcgacatttgcggcagcagcgtgcggtggaggactacggccggaacatcaagcagctggccagccgggcccagggcctgctgtctgcaggccaccctgagggggaacagatcatcagacttcaggggcaagtggacaagcactacgcagggctgaaggacgtggcggaagagcgcaagcgcaagctggagaacatgtaccacctgttccagctcaagcgggagaccgacgacctggagcagtggatttcagaaaaggagctagtggcctcttccccggaaatggggcaagactttgaccacgtgactcttctgcgggacaagttccgggactttgcccgggagaccggggcgattgggcaggagcgggtggacaatgtgaatgccttcatcgagcgactcatcgacgcgggccacagcgaggcggccaccatcgccgagtggaaggacgggctgaacgagatgtgggcagacctcctggagctcattgacacgcgcatgcagctgctggccgcctcctatgacctgcaccgctacttctacacgggtgccgagatcctgggcctcatcgacgagaagcaccgcgagctgcccgaggacgtggggctggacgccagcacggccgagtccttccaccgggtgcacacagccttcgagcgggagctccacctgctgggtgtccaggtgcagcagttccaggacgtggccacccgtctgcagacagcatatgctggggagaaggcagaggccatccagaacaaggagcaggaggtgtctgccgcgtggcaggcgctgctcgatgcctgtgccgggcgccggacccagctagtggacacggcggataaattccgcttcttcagcatggcccgtgacctcctctcctggatggagagcatcatccggcagatcgagacccaggagaggcccagggatgtctcctctgtggaactgctcatgaagtatcaccagggcatcaatgcagagattgaaacccggagcaagaacttcagtgcctgcctggagcttggcgagtccctgctgcagcggcagcaccaggcctcagaggagatccgcgagaaactgcagcaggtgatgtccaggaggaaagagatgaatgagaagtgggaagcccgctgggagcggctccgcatgttgctggaggtgtgccagttctcgagggatgcctctgtggctgaggcgtggctgattgcccaggagccctacctggccagcggggactttggacacacagtggacagtgtggagaagctcatcaagaggcatgaggcttttgagaagtccacggccagctgggcagagcgctttgctgccctggagaagcccaccacgcttgagctgaaagaacgccagattgcagagagacccgcagaggagactgggcctcaagaggaggaaggcgagacagcaggggaggctccagtttcccaccatgcggccaccgagagaacgtccccgggggaagaagagggaacgtggcctcagaacctgcagcagccaccaccgccgggtcagcacaaggatgggcagaaatccactggggatgagaggcccaccacggagcccctctttaaggtcctagatacgcctctgagcgagggtgatgagcccgcaacgctgccggccccgcgggaccatgggcagagtgtgcagatggaaggctacctgggccgcaagcatgacctggaggggcccaacaagaaggcttccaacaggtcctggaacaacctgtactgtgtgctcaggaacagtgagctaaccttctacaaggatgccaagaacctggccctggggatgccctaccatggggaggaacccctggccctgagacatgccatctgtgagattgctgccaactacaagaagaagaagcacgtctttaagctgaggctgagtaatggcagcgagtggctcttccatggcaaggatgaggaggagatgctgtcctggctgcagggcgtgagcaccgccatcaacgagtcccagagcatccgcgtcaaggcgcagagcctgcccctgccttccctctccggccccgacgccagcctcggcaagaaagacaaggagaagagattcagcttcttccccaaaaagaagtagcaggtggggctggcgggcgcggcggagtcgggacgcgcagagaccgggcagcccaggccttggcctcctctcgccgccgcccgccggtcgaatcgagatgagtcgagtcgcgggccgggcccccgggccccacgctgcactgcaaaagctgccttcgcccgcgtgtcctgggccgacgccccctccatgccctcgcccgcgctggctccgctccagggacaggggctcccagctcctctggcgcctttggggcctccaggcctgggggcaggaaacggttctctgaggcacacgccctcctctcccaccctcctcctgagccgagggggcacaggccccttacccccaaccaaaaaaaaaaaaaaaaaagagctggagaaggctgatggggttcttcaaacgctgcccgttcctaaagcaagtcttgcttcgggtcacctcccacctggtggcagccagggaaaggggaaaggaagaagacactggaaatgcatggccagccccctaggggcatgaggaaggagccttcaggtggcccacaaagccctagctctgggccaggggctctggggggctgaggggaccagactgggtgcagggccttgggagctgccagcctccttcccactgggcttccgcagaactgggactctcacttcaggggccaccacatccctcctctctgcttctccccccagatcaaagggtaccctcccacggttggcagggcctggctgagtgcctctagcaccctttgtgccaccacaggcggtcccaggaagggcagcaaggtcagaccattcctcattgaaaaccgtggctagggcacagggctctgatctgaaggagtgacaggtgcgtcacaacactgcctaaggctctccctctcaatgctgggaccctcgccccactcccagtggcagccaaaccagcaatatccaacagacataggccccctacgggacagtgtgggcccccagatataagatggataccccccgcacctgcagtaaagcatcccaaagccaaatgctcaattgcatcctgtctgcagctgggactttggagggtaatggctgggcagacagtaaagttgatcatctgttttctcggggtggcagacgcagccatgtcttggtatcaccacccatgtgacagctactcctgcacaactgggacaaatgtcagggccagagccatgaaggtgtggtaccccttgatcagcttctccacgtcctggccccaggtcttggcggggagggggtcacatgagtacagaggtcaaatatctaccaccctccagccctgagcaccagaagctctgcaaccaacgtccccaggaatggccttccccttgctgctcaggtcatacttctggaggaagagaaagctcattccatattttccccaccactctactccgaaagcaacacagttctggcccagtatcaaactagggttaggtccaagagagcagtcaagcgggtcgggggtgggggggagggcggagggcagcaggcattttcccccaaggaaaccatgaaagtccccagggcctgcagtcaagtttctatcaccttccccgtgagaaggaccttagttccatggagatgaagtgggtgaggttcaggtagaagccacaggggcaggcatccagaatgaggccccctgaggaaccctgagtgctgaccagtgccggcagaaatcagttccaccctgtggccctgacactatatgtcagggtgacaccaactgcagcaggcaggagccacaggaaggaagacgtcatccgatggagcctgacatccccaggttcccgccctggtgagcaaggtcttcatttggctttggtacatatgaccctatacagggaacctagtgtgtatcactcaccagcctctttctgtatctggggaaaccaaggcagtgaggtgactgcactcacctagcaataaagtaggcctttggtgcacttgcaggcatgtcctcctctggggcagagagcaggttccttgctgaagggcagatggtggcaaacatctccctcaactgtttccctgggccagtctttagggagcctagggacaagggcccaccctcccccttccacgtgtgccaaatcagcacctgaagtgaggcatttccagcaagcaactccacagacccgagaaaggaagggctctagtggaagagctagcatctcaccaccccaggtcccctggcctggtccagggcagccagctgcatgtgaccattctgttgccagctccccacacatccctcctgtcacccaggctccaagacattcgaccaactagactgaaaatgcaggcatccagctttgggagaccctgtgtgtgccacaccagggctaagctctcccagtgccctagcaaggtctttttttttttttctctccttattctactctacagtcttttgacagtattcccaaacgaggttgacacagctccagtccacaccagcataccaggcttccttcccagggcagtttagaggaagctccttctgggcaaggtcaggcggtcctccttccctctctccttcccctttgtcccagcctcaactgactctggctgtgggaggtgtggagggtccttaggcttccctccccaacctggcctccaccaacacccctaacaggaggcccgtggaaggctcagcctctcctccgcatccctcctccttcctgcctatcggagggagccagggtcccctaggctgaccctgaatcctcttcctcccttcatgggaggggggcaggaatccagaggaggatgaagccagcgggaccacatggcttggtggcttggacaaacaagctcagggaggaaatgaggaggcggcggctgcagaggaatgcaaccctgttgggcacagaccatgcaatctggggctggccctggggccagctgggtcctgtcctccacctgctcaaccgtgcttccaccaaccagaggaaacccatttactagtttttctaataaatcaataatgctccaaaaaaaaaaa

SEQ ID NO: 159 - DNA, 4476 bp, Homo sapiens
gggccggaaagttccggcgaactgggggagcggcagtgggagagcgtcgggcgggaggcggtggtcctgggagcggccccggcgccccgaagccgccccgagctggtggggagggcccggccggtggggccccgggggcctgcgggggaggggcgcctgggggtgcaagaggcgaattggctgcccggggtgcaggagggacaggtggtgcgggctgtccaggaaacctacctgaacgggaaggagccccaggagggagagggacccggcgaggggctcaggacccggaggcgccggcggaggaggaggtggtgactggcaggcccgggccccacggtacctccggggctgaaggggacgcaggatgtaggggcatggggagtcgggcgcagaagagtgcggggaaccgctgagctctgggagccactgcctgagggcaggccgcggccggcgggaacctcttctgccgtctcagcctgggcgtcgctgaagctgtgtctgcggggaggcagcggaaggcggcagaggctgggaggcggcagaatgcagccagaggagggcacaggctggctgctggagctgctgtccgaggtgcagctgcaacagtacttcctgcggctccgagatgacctcaacgtcacccgcctgtcccactttgagtacgtcaagaatgaggacctggagaagatcggcatgggtcggcctggccagcggcggctgtgggaggctgtgaagaggaggaaggccttgtgcaaacgcaagtcgtggatgagtaaggtgttcagtggaaagcgactggaggctgagttcccacctcatcactctcagagcaccttccggaagacctcgcccgcccctgggggcccagcaggggaggggcccctgcagagcctcacctgcctcattggggagaaggacctgcgcctcctggagaagctgggtgatggttcctttggcgtggtgcgcaggggcgagtgggacgcgccctcagggaagacggtgagtgtggctgtgaagtgcctgaagcccgatgtcctgagccagccagaagccatggacgacttcatccgggaggtcaatgccatgcactcgctcgaccaccgaaacctcatccgcctctacggggtggtgctcacgccgcccatgaagatggtgacagagctggcacctctgggatcgttgttggaccggctacgtaagcaccagggccacttcctcctggggactctgagccgctacgctgtgcaggtggctgagggcatgggctacctggagtccaagcgctttattcaccgtgacctggctgcccgcaatctgctgttggctacccgcgacctggtcaagatcggggactttgggctgatgcgagcactacctcagaatgacgaccattacgtcatgcaggaacatcgcaaggtgcccttcgcctggtgtgcccccgagagcctgaagacacgcaccttctcccatgccagcgacacctggatgttcggggtgacactgtgggaaatgttcacctacggccaggagccctggatcggcctcaacggcagtcagatcctgcataagatcgacaaggagggggagcggctgccccggcccgaggactgtccccaggacatctacaacgtcatggtccagtgctgggctcacaagccagaggacagacccacgtttgtggccctgcgggacttcctgctggaggcccagcccacagacatgcgggcccttcaggactttgaggaaccggacaagctgcacatccagatgaatgatgtcatcaccgtcatcgagggaagggccgagaactactggtggcgtggccagaacacacggacgctgtgtgtggggcccttccctcgcaacgtggtgacctccgtggccggcctgtcggcccaggacatcagccagcccctgcagaacagcttcatccacacagggcatggcgacagtgacccccgccactgctggggcttcccggacaggattgacgaactgtatctgggaaaccccatggacccccccgacctcctgagcgtggaactgagcacctcccggcccccccagcatctaggaggggtgaaaaaaccaacctatgaccctgtgagcgaggaccaagaccccttgtccagcgacttcaagaggctgggcctgcggaagccaggcctgccccgagggctgtggctggcgaagccctcggcgcgggtgccgggcaccaaggccagccgaggcagcggggctgaggtcacgctcatcgacttcggtgaggagcccgtggtcccggccctacggccctgcgcgccctccctggcgcagctggccatggacgcctgctccctgctggacgagaccccgcctcagagccccacgcgggcactgccccggcccctgcaccccacgcctgtggtggactgggacgcacgcccgctgccccccccgcccgcctatgacgacgtggcccaggatgaggatgactttgagatctgctccatcaacagcaccctcgtgggcgcgggggtccctgccgggcccagccagggccagaccaactacgcctttgtgcctgagcaggcgcggccgccccctcccctggaggacaacctgttcctcccgccccagggtgggggcaagccgcccagctccgcacagaccgcagagatcttccaggcgctacagcaggagtgcatgaggcaactgcaggctccggccggctccccggccccctctcccagcccggggggtgacgacaagccccaggtgcctcctcgggtacccatcccccctcggcccacgcgcccacacgtccagctgtctccagcccccccgggcgaggaggagaccagccagtggcctggacctgcttcccctccccgggtgcctccgcgggagcccctgtcccctcaaggctcgaggacacccagccccctggtaccacctggcagctccccgctgccaccccggctctcaagctcacctgggaagaccatgcccaccacccagagctttgcctcagaccccaagtacgccaccccccaggtgatccaggcccctggcccgcgggctggtccctgcatcctgcccatcgtccgggatggcaagaaggtcagcagcacccactattacttgctgcccgagcgaccatcctacctggagcgctaccagcgcttcctgcgtgaggcccagagccccgaggagcctacccccctgcctgtgcctctgctgctgcccccacccagcaccccagcccccgccgcccccacggccaccgtgcggccgatgccccaggctgccttggaccccaaggccaacttctccaccaacaacagcaacccaggggcccggccaccacccccgagggccactgctcggctgccacagaggggctgccctggcgatgggccagaggcgggccggccagcagacaagatccagatggccatggtgcatggggtgaccacagaggagtgccaggcggccctgcagtgccacggctggagcgtgcagagggctgcccagtatctgaaggtggagcagctcttcgggctgggtctgcggcccagaggggagtgccacaaagtgctggagatgttcgactggaacctggagcaggccggctgccaccttctgggctcctggggccctgcccaccacaagcgctgagatgcgtctggagagccagagggcctgcctgaaggaatcacctgagcctgtccgtccaccaggagtggggagatgcccccatccagtcctggaggacccgctgctcctgctgctcccggggatggagcaaggccaaggctgcgggaggctgggagccctgccctgcccatccctcctgcaccagcgctgtccctgcacactttggttcagtcccggtgcccctgccaagatgtggaaggggccgggtgaagacaggcttgagggctgccccagcaggctctgggtatgacctgcctctggccctggtcctgggcggggcctgtgggtggagtagtacccccaggccctgccctgggtgacagactgggaggaaaccaggctggacctgggcaggcgggatgtgttggccacagggagaggcggaccggcacccggtgggacctcctaggactgggccttcttccagggggcccctggcagcagctggggtgtcgggcagaatgtgacttgtggccttaccatggacttgaatgggacttggctggcctcaggatcttgtgcctggaaatagcctgaggtggctcaggaagcggagaaagggtgccagaccattctctggcggggaccagggcccaaggccccagggctggaaggagaccaaggggcagccgccctggagggacatcagtgcttcctcttccacccaattcccccacgcggttccatgttttcccaccagcctgttggcgaagttgctgctccggcattcagtacctgcttcttccagagaaataaagttagtttctattttatgtt

SEQ ID NO: 160 - DNA, 2588 bp, Homo sapiens
gatgggattggggttttcccctcccatgtgctcaagactggcgctaaaagttttgagcttctcaaaagtctagagccaccgtccagggagcaggtagctgctgggctccggggacactttgcgttcgggctgggagcgtgctttccacgacggtgacacgcttccctggattggccagactgccttccgggtcactgccatggaggagccgcagtcagatcctagcgtcgagccccctctgagtcaggaaacattttcagacctatggaaactacttcctgaaaacaacgttctgtcccccttgccgtcccaagcaatggatgatttgatgctgtccccggacgatattgaacaatggttcactgaagacccaggtccagatgaagctcccagaatgccagaggctgctccccccgtggcccctgcaccagcagctcctacaccggcggcccctgcaccagccccctcctggcccctgtcatcttctgtcccttcccagaaaacctaccagggcagctacggtttccgtctgggcttcttgcattctgggacagccaagtctgtgacttgcacgtactcccctgccctcaacaagatgttttgccaactggccaagacctgccctgtgcagctgtgggttgattccacacccccgcccggcacccgcgtccgcgccatggccatctacaagcagtcacagcacatgacggaggttgtgaggcgctgcccccaccatgagcgctgctcagatagcgatggtctggcccctcctcagcatcttatccgagtggaaggaaatttgcgtgtggagtatttggatgacagaaacacttttcgacatagtgtggtggtgccctatgagccgcctgaggttggctctgactgtaccaccatccactacaactacatgtgtaacagttcctgcatgggcggcatgaaccggaggcccatcctcaccatcatcacactggaagactccagtggtaatctactgggacggaacagctttgaggtgcgtgtttgtgcctgtcctgggagagaccggcgcacagaggaagagaatctccgcaagaaaggggagcctcaccacgagctgcccccagggagcactaagcgagcactgcccaacaacaccagctcctctccccagccaaagaagaaaccactggatggagaatatttcacccttcagatccgtgggcgtgagcgcttcgagatgttccgagagctgaatgaggccttggaactcaaggatgcccaggctgggaaggagccaggggggagcagggctcactccagccacctgaagtccaaaaagggtcagtctacctcccgccataaaaaactcatgttcaagacagaagggcctgactcagactgacattctccacttcttgttccccactgacagcctcccacccccatctctccctcccctgccattttgggttttgggtctttgaacccttgcttgcaataggtgtgcgtcagaagcacccaggacttccatttgctttgtcccggggctccactgaacaagttggcctgcactggtgttttgttgtggggaggaggatggggagtaggacataccagcttagattttaaggtttttactgtgagggatgtttgggagatgtaagaaatgttcttgcagttaagggttagtttacaatcagccacattctaggtaggggcccacttcaccgtactaaccagggaagctgtccctcactgttgaattttctctaacttcaaggcccatatctgtgaaatgctggcatttgcacctacctcacagagtgcattgtgagggttaatgaaataatgtacatctggccttgaaaccaccttttattacatggggtctagaacttgacccccttgagggtgcttgttccctctccctgttggtcggtgggttggtagtttctacagttgggcagctggttaggtagagggagttgtcaagtctctgctggcccagccaaaccctgtctgacaacctcttggtgaaccttagtacctaaaaggaaatctcaccccatcccacaccctggaggatttcatctcttgtatatgatgatctggatccaccaagacttgttttatgctcagggtcaatttcttttttcttttttttttttttttttctttttctttgagactgggtctcgctttgttgcccaggctggagtggagtggcgtgatcttggcttactgcagcctttgcctccccggctcgagcagtcctgcctcagcctccggagtagctgggaccacaggttcatgccaccatggccagccaacttttgcatgttttgtagagatggggtctcacagtgttgcccaggctggtctcaaactcctgggctcaggcgatccacctgtctcagcctcccagagtgctgggattacaattgtgagccaccacgtccagctggaagggtcaacatcttttacattctgcaagcacatctgcattttcaccccacccttcccctccttctccctttttatatcccatttttatatcgatctcttattttacaataaaactttgctgccacctgtgtgtctgaggggtg

SEQ ID NO: 161 - DNA, 2651 bp, Homo sapiens
gatgggattggggttttcccctcccatgtgctcaagactggcgctaaaagttttgagcttctcaaaagtctagagccaccgtccagggagcaggtagctgctgggctccggggacactttgcgttcgggctgggagcgtgctttccacgacggtgacacgcttccctggattggcagccagactgccttccgggtcactgccatggaggagccgcagtcagatcctagcgtcgagccccctctgagtcaggaaacattttcagacctatggaaactacttcctgaaaacaacgttctgtcccccttgccgtcccaagcaatggatgatttgatgctgtccccggacgatattgaacaatggttcactgaagacccaggtccagatgaagctcccagaatgccagaggctgctccccccgtggcccctgcaccagcagctcctacaccggcggcccctgcaccagccccctcctggcccctgtcatcttctgtcccttcccagaaaacctaccagggcagctacggtttccgtctgggcttcttgcattctgggacagccaagtctgtgacttgcacgtactcccctgccctcaacaagatgttttgccaactggccaagacctgccctgtgcagctgtgggttgattccacacccccgcccggcacccgcgtccgcgccatggccatctacaagcagtcacagcacatgacggaggttgtgaggcgctgcccccaccatgagcgctgctcagatagcgatggtctggcccctcctcagcatcttatccgagtggaaggaaatttgcgtgtggagtatttggatgacagaaacacttttcgacatagtgtggtggtgccctatgagccgcctgaggttggctctgactgtaccaccatccactacaactacatgtgtaacagttcctgcatgggcggcatgaaccggaggcccatcctcaccatcatcacactggaagactccagtggtaatctactgggacggaacagctttgaggtgcgtgtttgtgcctgtcctgggagagaccggcgcacagaggaagagaatctccgcaagaaaggggagcctcaccacgagctgcccccagggagcactaagcgagcactgcccaacaacaccagctcctctccccagccaaagaagaaaccactggatggagaatatttcacccttcagatgctacttgacttacgatggtgttacttcctgataaactcgtcgtaagttgaaaatattatccgtgggcgtgagcgcttcgagatgttccgagagctgaatgaggccttggaactcaaggatgcccaggctgggaaggagccaggggggagcagggctcactccagccacctgaagtccaaaaagggtcagtctacctcccgccataaaaaactcatgttcaagacagaagggcctgactcagactgacattctccacttcttgttccccactgacagcctcccacccccatctctccctcccctgccattttgggttttgggtctttgaacccttgcttgcaataggtgtgcgtcagaagcacccaggacttccatttgctttgtcccggggctccactgaacaagttggcctgcactggtgttttgttgtggggaggaggatggggagtaggacataccagcttagattttaaggtttttactgtgagggatgtttgggagatgtaagaaatgttcttgcagttaagggttagtttacaatcagccacattctaggtaggggcccacttcaccgtactaaccagggaagctgtccctcactgttgaattttctctaacttcaaggcccatatctgtgaaatgctggcatttgcacctacctcacagagtgcattgtgagggttaatgaaataatgtacatctggccttgaaaccaccttttattacatggggtctagaacttgacccccttgagggtgcttgttccctctccctgttggtcggtgggttggtagtttctacagttgggcagctggttaggtagagggagttgtcaagtctctgctggcccagccaaaccctgtctgacaacctcttggtgaaccttagtacctaaaaggaaatctcaccccatcccacaccctggaggatttcatctcttgtatatgatgatctggatccaccaagacttgttttatgctcagggtcaatttcttttttcttttttttttttttttttctttttctttgagactgggtctcgctttgttgcccaggctggagtggagtggcgtgatcttggcttactgcagcctttgcctccccggctcgagcagtcctgcctcagcctccggagtagctgggaccacaggttcatgccaccatggccagccaacttttgcatgttttgtagagatggggtctcacagtgttgcccaggctggtctcaaactcctgggctcaggcgatccacctgtctcagcctcccagagtgctgggattacaattgtgagccaccacgtccagctggaagggtcaacatcttttacattctgcaagcacatctgcattttcaccccacccttcccctccttctccctttttatatcccatttttatatcgatctcttattttacaataaaactttgctgccacctgtgtgtctgaggggtg

SEQ ID NO: 162 - DNA, 2724 bp, Homo sapiens
gatgggattggggttttcccctcccatgtgctcaagactggcgctaaaagttttgagcttctcaaaagtctagagccaccgtccagggagcaggtagctgctgggctccggggacactttgcgttcgggctgggagcgtgctttccacgacggtgacacgcttccctggattggcagccagactgccttccgggtcactgccatggaggagccgcagtcagatcctagcgtcgagccccctctgagtcaggaaacattttcagacctatggaaactacttcctgaaaacaacgttctgtcccccttgccgtcccaagcaatggatgatttgatgctgtccccggacgatattgaacaatggttcactgaagacccaggtccagatgaagctcccagaatgccagaggctgctccccccgtggcccctgcaccagcagctcctacaccggcggcccctgcaccagccccctcctggcccctgtcatcttctgtcccttcccagaaaacctaccagggcagctacggtttccgtctgggcttcttgcattctgggacagccaagtctgtgacttgcacgtactcccctgccctcaacaagatgttttgccaactggccaagacctgccctgtgcagctgtgggttgattccacacccccgcccggcacccgcgtccgcgccatggccatctacaagcagtcacagcacatgacggaggttgtgaggcgctgcccccaccatgagcgctgctcagatagcgatggtctggcccctcctcagcatcttatccgagtggaaggaaatttgcgtgtggagtatttggatgacagaaacacttttcgacatagtgtggtggtgccctatgagccgcctgaggttggctctgactgtaccaccatccactacaactacatgtgtaacagttcctgcatgggcggcatgaaccggaggcccatcctcaccatcatcacactggaagactccagtggtaatctactgggacggaacagctttgaggtgcgtgtttgtgcctgtcctgggagagaccggcgcacagaggaagagaatctccgcaagaaaggggagcctcaccacgagctgcccccagggagcactaagcgagcactgcccaacaacaccagctcctctccccagccaaagaagaaaccactggatggagaatatttcacccttcaggaccagaccagctttcaaaaagaaaattgttaaagagagcatgaaaatggttctatgactttgcctgatacagatgctacttgacttacgatggtgttacttcctgataaactcgtcgtaagttgaaaatattatccgtgggcgtgagcgcttcgagatgttccgagagctgaatgaggccttggaactcaaggatgcccaggctgggaaggagccaggggggagcagggctcactccagccacctgaagtccaaaaagggtcagtctacctcccgccataaaaaactcatgttcaagacagaagggcctgactcagactgacattctccacttcttgttccccactgacagcctcccacccccatctctccctcccctgccattttgggttttgggtctttgaacccttgcttgcaataggtgtgcgtcagaagcacccaggacttccatttgctttgtcccggggctccactgaacaagttggcctgcactggtgttttgttgtggggaggaggatggggagtaggacataccagcttagattttaaggtttttactgtgagggatgtttgggagatgtaagaaatgttcttgcagttaagggttagtttacaatcagccacattctaggtaggggcccacttcaccgtactaaccagggaagctgtccctcactgttgaattttctctaacttcaaggcccatatctgtgaaatgctggcatttgcacctacctcacagagtgcattgtgagggttaatgaaataatgtacatctggccttgaaaccaccttttattacatggggtctagaacttgacccccttgagggtgcttgttccctctccctgttggtcggtgggttggtagtttctacagttgggcagctggttaggtagagggagttgtcaagtctctgctggcccagccaaaccctgtctgacaacctcttggtgaaccttagtacctaaaaggaaatctcaccccatcccacaccctggaggatttcatctcttgtatatgatgatctggatccaccaagacttgttttatgctcagggtcaatttcttttttcttttttttttttttttttctttttctttgagactgggtctcgctttgttgcccaggctggagtggagtggcgtgatcttggcttactgcagcctttgcctccccggctcgagcagtcctgcctcagcctccggagtagctgggaccacaggttcatgccaccatggccagccaacttttgcatgttttgtagagatggggtctcacagtgttgcccaggctggtctcaaactcctgggctcaggcgatccacctgtctcagcctcccagagtgctgggattacaattgtgagccaccacgtccagctggaagggtcaacatcttttacattctgcaagcacatctgcattttcaccccacccttcccctccttctccctttttatatcccatttttatatcgatctcttattttacaataaaactttgctgccacctgtgtgtctgaggggtg

SEQ ID NO: 163 - DNA, 2271 bp, Homo sapiens
tgaggccaggagatggaggctgcagtgagctgtgatcacaccactgtgctccagcctgagtgacagagcaagaccctatctcaaaaaaaaaaaaaaaaaagaaaagctcctgaggtgtagacgccaactctctctagctcgctagtgggttgcaggaggtgcttacgcatgtttgtttctttgctgccgtcttccagttgctttatctgttcacttgtgccctgactttcaactctgtctccttcctcttcctacagtactcccctgccctcaacaagatgttttgccaactggccaagacctgccctgtgcagctgtgggttgattccacacccccgcccggcacccgcgtccgcgccatggccatctacaagcagtcacagcacatgacggaggttgtgaggcgctgcccccaccatgagcgctgctcagatagcgatggtctggcccctcctcagcatcttatccgagtggaaggaaatttgcgtgtggagtatttggatgacagaaacacttttcgacatagtgtggtggtgccctatgagccgcctgaggttggctctgactgtaccaccatccactacaactacatgtgtaacagttcctgcatgggcggcatgaaccggaggcccatcctcaccatcatcacactggaagactccagtggtaatctactgggacggaacagctttgaggtgcgtgtttgtgcctgtcctgggagagaccggcgcacagaggaagagaatctccgcaagaaaggggagcctcaccacgagctgcccccagggagcactaagcgagcactgcccaacaacaccagctcctctccccagccaaagaagaaaccactggatggagaatatttcacccttcagatccgtgggcgtgagcgcttcgagatgttccgagagctgaatgaggccttggaactcaaggatgcccaggctgggaaggagccaggggggagcagggctcactccagccacctgaagtccaaaaagggtcagtctacctcccgccataaaaaactcatgttcaagacagaagggcctgactcagactgacattctccacttcttgttccccactgacagcctcccacccccatctctccctcccctgccattttgggttttgggtctttgaacccttgcttgcaataggtgtgcgtcagaagcacccaggacttccatttgctttgtcccggggctccactgaacaagttggcctgcactggtgttttgttgtggggaggaggatggggagtaggacataccagcttagattttaaggtttttactgtgagggatgtttgggagatgtaagaaatgttcttgcagttaagggttagtttacaatcagccacattctaggtaggggcccacttcaccgtactaaccagggaagctgtccctcactgttgaattttctctaacttcaaggcccatatctgtgaaatgctggcatttgcacctacctcacagagtgcattgtgagggttaatgaaataatgtacatctggccttgaaaccaccttttattacatggggtctagaacttgacccccttgagggtgcttgttccctctccctgttggtcggtgggttggtagtttctacagttgggcagctggttaggtagagggagttgtcaagtctctgctggcccagccaaaccctgtctgacaacctcttggtgaaccttagtacctaaaaggaaatctcaccccatcccacaccctggaggatttcatctcttgtatatgatgatctggatccaccaagacttgttttatgctcagggtcaatttcttttttcttttttttttttttttttctttttctttgagactgggtctcgctttgttgcccaggctggagtggagtggcgtgatcttggcttactgcagcctttgcctccccggctcgagcagtcctgcctcagcctccggagtagctgggaccacaggttcatgccaccatggccagccaacttttgcatgttttgtagagatggggtctcacagtgttgcccaggctggtctcaaactcctgggctcaggcgatccacctgtctcagcctcccagagtgctgggattacaattgtgagccaccacgtccagctggaagggtcaacatcttttacattctgcaagcacatctgcattttcaccccacccttcccctccttctccctttttatatcccatttttatatcgatctcttattttacaataaaactttgctgccacctgtgtgtctgaggggtg

SEQ ID NO: 164 - DNA, 2404 bp, Homo sapiens
tgaggccaggagatggaggctgcagtgagctgtgatcacaccactgtgctccagcctgagtgacagagcaagaccctatctcaaaaaaaaaaaaaaaaaagaaaagctcctgaggtgtagacgccaactctctctagctcgctagtgggttgcaggaggtgcttacgcatgtttgtttctttgctgccgtcttccagttgctttatctgttcacttgtgccctgactttcaactctgtctccttcctcttcctacagtactcccctgccctcaacaagatgttttgccaactggccaagacctgccctgtgcagctgtgggttgattccacacccccgcccggcacccgcgtccgcgccatggccatctacaagcagtcacagcacatgacggaggttgtgaggcgctgcccccaccatgagcgctgctcagatagcgatggtctggcccctcctcagcatcttatccgagtggaaggaaatttgcgtgtggagtatttggatgacagaaacacttttcgacatagtgtggtggtgccctatgagccgcctgaggttggctctgactgtaccaccatccactacaactacatgtgtaacagttcctgcatgggcggcatgaaccggaggcccatcctcaccatcatcacactggaagactccagtggtaatctactgggacggaacagctttgaggtgcgtgtttgtgcctgtcctgggagagaccggcgcacagaggaagagaatctccgcaagaaaggggagcctcaccacgagctgcccccagggagcactaagcgagcactgcccaacaacaccagctcctctccccagccaaagaagaaaccactggatggagaatatttcacccttcaggaccagaccagctttcaaaaagaaaattgttaaagagagcatgaaaatggttctatgactttgcctgatacagatgctacttgacttacgatggtgttacttcctgataaactcgtcgtaagttgaaaatattatccgtgggcgtgagcgcttcgagatgttccgagagctgaatgaggccttggaactcaaggatgcccaggctgggaaggagccaggggggagcagggctcactccagccacctgaagtccaaaaagggtcagtctacctcccgccataaaaaactcatgttcaagacagaagggcctgactcagactgacattctccacttcttgttccccactgacagcctcccacccccatctctccctcccctgccattttgggttttgggtctttgaacccttgcttgcaataggtgtgcgtcagaagcacccaggacttccatttgctttgtcccggggctccactgaacaagttggcctgcactggtgttttgttgtggggaggaggatggggagtaggacataccagcttagattttaaggtttttactgtgagggatgtttgggagatgtaagaaatgttcttgcagttaagggttagtttacaatcagccacattctaggtaggggcccacttcaccgtactaaccagggaagctgtccctcactgttgaattttctctaacttcaaggcccatatctgtgaaatgctggcatttgcacctacctcacagagtgcattgtgagggttaatgaaataatgtacatctggccttgaaaccaccttttattacatggggtctagaacttgacccccttgagggtgcttgttccctctccctgttggtcggtgggttggtagtttctacagttgggcagctggttaggtagagggagttgtcaagtctctgctggcccagccaaaccctgtctgacaacctcttggtgaaccttagtacctaaaaggaaatctcaccccatcccacaccctggaggatttcatctcttgtatatgatgatctggatccaccaagacttgttttatgctcagggtcaatttcttttttcttttttttttttttttttctttttctttgagactgggtctcgctttgttgcccaggctggagtggagtggcgtgatcttggcttactgcagcctttgcctccccggctcgagcagtcctgcctcagcctccggagtagctgggaccacaggttcatgccaccatggccagccaacttttgcatgttttgtagagatggggtctcacagtgttgcccaggctggtctcaaactcctgggctcaggcgatccacctgtctcagcctcccagagtgctgggattacaattgtgagccaccacgtccagctggaagggtcaacatcttttacattctgcaagcacatctgcattttcaccccacccttcccctccttctccctttttatatcccatttttatatcgatctcttattttacaataaaactttgctgccacctgtgtgtctgaggggtg

SEQ ID NO: 165 - DNA, 2331 bp, Homo sapiens
tgaggccaggagatggaggctgcagtgagctgtgatcacaccactgtgctccagcctgagtgacagagcaagaccctatctcaaaaaaaaaaaaaaaaaagaaaagctcctgaggtgtagacgccaactctctctagctcgctagtgggttgcaggaggtgcttacgcatgtttgtttctttgctgccgtcttccagttgctttatctgttcacttgtgccctgactttcaactctgtctccttcctcttcctacagtactcccctgccctcaacaagatgttttgccaactggccaagacctgccctgtgcagctgtgggttgattccacacccccgcccggcacccgcgtccgcgccatggccatctacaagcagtcacagcacatgacggaggttgtgaggcgctgcccccaccatgagcgctgctcagatagcgatggtctggcccctcctcagcatcttatccgagtggaaggaaatttgcgtgtggagtatttggatgacagaaacacttttcgacatagtgtggtggtgccctatgagccgcctgaggttggctctgactgtaccaccatccactacaactacatgtgtaacagttcctgcatgggcggcatgaaccggaggcccatcctcaccatcatcacactggaagactccagtggtaatctactgggacggaacagctttgaggtgcgtgtttgtgcctgtcctgggagagaccggcgcacagaggaagagaatctccgcaagaaaggggagcctcaccacgagctgcccccagggagcactaagcgagcactgcccaacaacaccagctcctctccccagccaaagaagaaaccactggatggagaatatttcacccttcagatgctacttgacttacgatggtgttacttcctgataaactcgtcgtaagttgaaaatattatccgtgggcgtgagcgcttcgagatgttccgagagctgaatgaggccttggaactcaaggatgcccaggctgggaaggagccaggggggagcagggctcactccagccacctgaagtccaaaaagggtcagtctacctcccgccataaaaaactcatgttcaagacagaagggcctgactcagactgacattctccacttcttgttccccactgacagcctcccacccccatctctccctcccctgccattttgggttttgggtctttgaacccttgcttgcaataggtgtgcgtcagaagcacccaggacttccatttgctttgtcccggggctccactgaacaagttggcctgcactggtgttttgttgtggggaggaggatggggagtaggacataccagcttagattttaaggtttttactgtgagggatgtttgggagatgtaagaaatgttcttgcagttaagggttagtttacaatcagccacattctaggtaggggcccacttcaccgtactaaccagggaagctgtccctcactgttgaattttctctaacttcaaggcccatatctgtgaaatgctggcatttgcacctacctcacagagtgcattgtgagggttaatgaaataatgtacatctggccttgaaaccaccttttattacatggggtctagaacttgacccccttgagggtgcttgttccctctccctgttggtcggtgggttggtagtttctacagttgggcagctggttaggtagagggagttgtcaagtctctgctggcccagccaaaccctgtctgacaacctcttggtgaaccttagtacctaaaaggaaatctcaccccatcccacaccctggaggatttcatctcttgtatatgatgatctggatccaccaagacttgttttatgctcagggtcaatttcttttttcttttttttttttttttttctttttctttgagactgggtctcgctttgttgcccaggctggagtggagtggcgtgatcttggcttactgcagcctttgcctccccggctcgagcagtcctgcctcagcctccggagtagctgggaccacaggttcatgccaccatggccagccaacttttgcatgttttgtagagatggggtctcacagtgttgcccaggctggtctcaaactcctgggctcaggcgatccacctgtctcagcctcccagagtgctgggattacaattgtgagccaccacgtccagctggaagggtcaacatcttttacattctgcaagcacatctgcattttcaccccacccttcccctccttctccctttttatatcccatttttatatcgatctcttattttacaataaaactttgctgccacctgtgtgtctgaggggtg

SEQ ID NO: 166 - DNA, 2708 bp, Homo sapiens
gatgggattggggttttcccctcccatgtgctcaagactggcgctaaaagttttgagcttctcaaaagtctagagccaccgtccagggagcaggtagctgctgggctccggggacactttgcgttcgggctgggagcgtgctttccacgacggtgacacgcttccctggattggcagccagactgccttccgggtcactgccatggaggagccgcagtcagatcctagcgtcgagccccctctgagtcaggaaacattttcagacctatggaaactgtgagtggatccattggaagggcaggcccaccacccccaccccaaccccagccccctagcagagacctgtgggaagcgaaaattccatgggactgactttctgctcttgtctttcagacttcctgaaaacaacgttctgtcccccttgccgtcccaagcaatggatgatttgatgctgtccccggacgatattgaacaatggttcactgaagacccaggtccagatgaagctcccagaatgccagaggctgctccccccgtggcccctgcaccagcagctcctacaccggcggcccctgcaccagccccctcctggcccctgtcatcttctgtcccttcccagaaaacctaccagggcagctacggtttccgtctgggcttcttgcattctgggacagccaagtctgtgacttgcacgtactcccctgccctcaacaagatgttttgccaactggccaagacctgccctgtgcagctgtgggttgattccacacccccgcccggcacccgcgtccgcgccatggccatctacaagcagtcacagcacatgacggaggttgtgaggcgctgcccccaccatgagcgctgctcagatagcgatggtctggcccctcctcagcatcttatccgagtggaaggaaatttgcgtgtggagtatttggatgacagaaacacttttcgacatagtgtggtggtgccctatgagccgcctgaggttggctctgactgtaccaccatccactacaactacatgtgtaacagttcctgcatgggcggcatgaaccggaggcccatcctcaccatcatcacactggaagactccagtggtaatctactgggacggaacagctttgaggtgcgtgtttgtgcctgtcctgggagagaccggcgcacagaggaagagaatctccgcaagaaaggggagcctcaccacgagctgcccccagggagcactaagcgagcactgcccaacaacaccagctcctctccccagccaaagaagaaaccactggatggagaatatttcacccttcagatccgtgggcgtgagcgcttcgagatgttccgagagctgaatgaggccttggaactcaaggatgcccaggctgggaaggagccaggggggagcagggctcactccagccacctgaagtccaaaaagggtcagtctacctcccgccataaaaaactcatgttcaagacagaagggcctgactcagactgacattctccacttcttgttccccactgacagcctcccacccccatctctccctcccctgccattttgggttttgggtctttgaacccttgcttgcaataggtgtgcgtcagaagcacccaggacttccatttgctttgtcccggggctccactgaacaagttggcctgcactggtgttttgttgtggggaggaggatggggagtaggacataccagcttagattttaaggtttttactgtgagggatgtttgggagatgtaagaaatgttcttgcagttaagggttagtttacaatcagccacattctaggtaggggcccacttcaccgtactaaccagggaagctgtccctcactgttgaattttctctaacttcaaggcccatatctgtgaaatgctggcatttgcacctacctcacagagtgcattgtgagggttaatgaaataatgtacatctggccttgaaaccaccttttattacatggggtctagaacttgacccccttgagggtgcttgttccctctccctgttggtcggtgggttggtagtttctacagttgggcagctggttaggtagagggagttgtcaagtctctgctggcccagccaaaccctgtctgacaacctcttggtgaaccttagtacctaaaaggaaatctcaccccatcccacaccctggaggatttcatctcttgtatatgatgatctggatccaccaagacttgttttatgctcagggtcaatttcttttttcttttttttttttttttttctttttctttgagactgggtctcgctttgttgcccaggctggagtggagtggcgtgatcttggcttactgcagcctttgcctccccggctcgagcagtcctgcctcagcctccggagtagctgggaccacaggttcatgccaccatggccagccaacttttgcatgttttgtagagatggggtctcacagtgttgcccaggctggtctcaaactcctgggctcaggcgatccacctgtctcagcctcccagagtgctgggattacaattgtgagccaccacgtccagctggaagggtcaacatcttttacattctgcaagcacatctgcattttcaccccacccttcccctccttctccctttttatatcccatttttatatcgatctcttattttacaataaaactttgctgccacctgtgtgtctgaggggtg

SEQ ID NO: 167 - DNA, 2651 bp, Homo sapiens; identical to SEQ ID NO: 161

SEQ ID NO: 168 - DNA, 2724 bp, Homo sapiens; identical to SEQ ID NO: 162

SEQ ID NO: 169 - DNA, 2271 bp, Homo sapiens; identical to SEQ ID NO: 163

SEQ ID NO: 170 - DNA, 2404 bp, Homo sapiens; identical to SEQ ID NO: 164

SEQ ID NO: 171 - DNA, 2331 bp, Homo sapiens; identical to SEQ ID NO: 165

SEQ ID NO: 172 - DNA, 2591 bp, Homo sapiens; identical to SEQ ID NO: 64

SEQ ID NO: 173 - DNA, 2588 bp, Homo sapiens; identical to SEQ ID NO: 160

SEQ ID NO: 174 - DNA, 2848 bp, Homo sapiens
ctctcagggcgacagttacaggcaaagaagaggaagtggtagcactagctgtcgctccacaggcgagcagggcaggcgtgcgggcgggtgggtggtggaggctgcgagggtgcacggccggccctgggcaggcggtagccatggagctgtggcgccaatgcacccactggctcatccagtgccgggtgctgccgcccagccaccgcgtgacctgggatggggctcaggtgtgtgaactggcccaggccctccgggatggtgtccttctgtgtcagctgcttaacaacctgctaccccatgccatcaacctgcgtgaggtcaacctgcgcccccagatgtcccagttcctgtgccttaagaacattagaaccttcctgtccacctgctgtgagaagttcggcctcaagcggagcgagctcttcgaagcctttgacctcttcgatgtgcaggattttggcaaggtcatctacaccctgtctgctctgtcctggaccccgatcgcccagaacagggggatcatgcccttccccaccgaggaggagagtgtaggtgatgaagacatctacagtggcctgtccgaccagatcgacgacacggtggaggaggatgaggacctgtatgactgcgtggagaatgaggaggcggaaggcgacgagatctatgaggacctcatgcgctcggagcccgtgtccatgccgcatttcttgaagcccctgcaacggttcctgaaacctcaagacattgagatcatctttatcaacattgaggacctgcttcgtgttcatactcacttcctaaaggagatgaaggaagccctgggcacccctggcgcagccaatctctaccaggtcttcatcaaatacaaggagaggttcctcgtctatggccgctactgcagccaggtggagtcagccagcaaacacctggaccgtgtggccgcagcccgggaggacgtgcagatgaagctggaggaatgttctcagagagccaacaacgggaggttcaccctgcgggacctgctgatggtgcctatgcagcgagttctcaaatatcacctccttctccaggagctggtgaaacacacgcaggaggcgatggagaaggagaacctgcggctggccctggatgccatgagggacctggctcagtgcgtgaacgaggtcaagcgagacaacgagacactgcgacagatcaccaatttccagctgtccattgagaacctggaccagtctctggctcactatggccggcccaagatcgacggggaactcaagatcacctcggtggaacggcgctccaagatggacaggtatgccttcctgctcgacaaagctctactcatctgtaagcgcaggggagactcctatgacctcaaggactttgtaaacctgcacagcttccaggttcgggatgactcttcaggagaccgagacaacaagaagtggagccacatgttcctcctgatcgaggaccaaggtgcccagggctatgagctgttcttcaagacaagagaattgaagaagaagtggatggagcagtttgagatggccatctccaacatctatccggagaatgccaccgccaacgggcatgacttccagatgttctcctttgaggagaccacatcctgcaaggcctgtcagatgctgcttagaggtaccttctatcagggctaccgctgccatcggtgccgggcatctgcacacaaggagtgtctggggagggtccctccatgtggccgacatgggcaagatttcccaggaactatgaagaaggacaaactacatcgcagggctcaggacaaaaagaggaatgagctgggtctgcccaagatggaggtgtttcaggaatactacgggcttcctccaccccctggagccattggaccctttctacggctcaaccctggagacattgtggagctcacgaaggctgaggctgaacagaactggtgggagggcagaaatacatctactaatgaaattggctggtttccttgtaacagggtgaagccctatgtccatggccctcctcaggacctgtctgttcatctctggtacgcaggccccatggagcgggcaggggcagagagcatcctggccaaccgctcggacgggactttcttggtgcggcagagggtgaaggatgcagcagaatttgccatcagcattaaatataacgtcgaggtcaagcacattaaaatcatgacagcagaaggactgtaccggatcacagagaaaaaggctttccgggggcttacggagctggtggagttttaccagcagaactctctaaaggattgcttcaagtctctggacaccaccttgcagttccccttcaaggagcctgaaaagagaaccatcagcaggccagcagtgggaagcacaaagtattttggcacagccaaagcccgctatgacttctgcgcccgagaccgatcagagctgtcgctcaaggagggtgacatcatcaagatccttaacaagaagggacagcaaggctggtggcgaggggagatctatggccgggttggctggttccctgccaactacgtggaggaagattattctgaatactgctgagccctggtgccttggcagagagacgagaaactccaggctctgagcccggcgtgggcaggcagcggagccaggggctgtgacagctcccggcgggtggagactttgggatggactggaggaggccagcgtccagctggcggtgctcccgggatgtgccctgacatggttaatttataacaccccgatttcctcttgggtcccctcaagcagacggggctcaagggggttacatttaataaaaggatgaagatggatagaaaaaaaaa

SEQ ID NO: 175 - DNA, 2944 bp, Homo sapiens
ctctcagggcgacagttacaggcaaagaagaggaagtggtagcactagctgtcgctccacaggcgagcagggcaggcgtgcgggcgggtgggtggtggaggctgcgagggtgcacggccggccctgggcaggcggtagccatggagctgtggcgccaatgcacccactggctcatccagtgccgggtgctgccgcccagccaccgcgtgacctgggatggggctcaggtgtgtgaactggcccaggccctccgggatggtgtccttctgtgtcagctgcttaacaacctgctaccccatgccatcaacctgcgtgaggtcaacctgcgcccccagatgtcccagttcctgtgccttaagaacattagaaccttcctgtccacctgctgtgagaagttcggcctcaagcggagcgagctcttcgaagcctttgacctcttcgatgtgcaggattttggcaaggtcatctacaccctgtctgctctgtcctggaccccgatcgcccagaacagggggatcatgcccttccccaccgaggaggagagtgtaggtgatgaagacatctacagtggcctgtccgaccagatcgacgacacggtggaggaggatgaggacctgtatgactgcgtggagaatgaggaggcggaaggcgacgagatctatgaggacctcatgcgctcggagcccgtgtccatgccgcccaagatgacagagtatgacaagcgctgctgctgcctgcgggagatccagcagacggaggagaagtacactgacacgctgggctccatccagcagcatttcttgaagcccctgcaacggttcctgaaacctcaagacattgagatcatctttatcaacattgaggacctgcttcgtgttcatactcacttcctaaaggagatgaaggaagccctgggcacccctggcgcagccaatctctaccaggtcttcatcaaatacaaggagaggttcctcgtctatggccgctactgcagccaggtggagtcagccagcaaacacctggaccgtgtggccgcagcccgggaggacgtgcagatgaagctggaggaatgttctcagagagccaacaacgggaggttcaccctgcgggacctgctgatggtgcctatgcagcgagttctcaaatatcacctccttctccaggagctggtgaaacacacgcaggaggcgatggagaaggagaacctgcggctggccctggatgccatgagggacctggctcagtgcgtgaacgaggtcaagcgagacaacgagacactgcgacagatcaccaatttccagctgtccattgagaacctggaccagtctctggctcactatggccggcccaagatcgacggggaactcaagatcacctcggtggaacggcgctccaagatggacaggtatgccttcctgctcgacaaagctctactcatctgtaagcgcaggggagactcctatgacctcaaggactttgtaaacctgcacagcttccaggttcgggatgactcttcaggagaccgagacaacaagaagtggagccacatgttcctcctgatcgaggaccaaggtgcccagggctatgagctgttcttcaagacaagagaattgaagaagaagtggatggagcagtttgagatggccatctccaacatctatccggagaatgccaccgccaacgggcatgacttccagatgttctcctttgaggagaccacatcctgcaaggcctgtcagatgctgcttagaggtaccttctatcagggctaccgctgccatcggtgccgggcatctgcacacaaggagtgtctggggagggtccctccatgtggccgacatgggcaagatttcccaggaactatgaagaaggacaaactacatcgcagggctcaggacaaaaagaggaatgagctgggtctgcccaagatggaggtgtttcaggaatactacgggcttcctccaccccctggagccattggaccctttctacggctcaaccctggagacattgtggagctcacgaaggctgaggctgaacagaactggtgggagggcagaaatacatctactaatgaaattggctggtttccttgtaacagggtgaagccctatgtccatggccctcctcaggacctgtctgttcatctctggtacgcaggccccatggagcgggcaggggcagagagcatcctggccaaccgctcggacgggactttcttggtgcggcagagggtgaaggatgcagcagaatttgccatcagcattaaatataacgtcgaggtcaagcacattaaaatcatgacagcagaaggactgtaccggatcacagagaaaaaggctttccgggggcttacggagctggtggagttttaccagcagaactctctaaaggattgcttcaagtctctggacaccaccttgcagttccccttcaaggagcctgaaaagagaaccatcagcaggccagcagtgggaagcacaaagtattttggcacagccaaagcccgctatgacttctgcgcccgagaccgatcagagctgtcgctcaaggagggtgacatcatcaagatccttaacaagaagggacagcaaggctggtggcgaggggagatctatggccgggttggctggttccctgccaactacgtggaggaagattattctgaatactgctgagccctggtgccttggcagagagacgagaaactccaggctctgagcccggcgtgggcaggcagcggagccaggggctgtgacagctcccggcgggtggagactttgggatggactggaggaggccagcgtccagctggcggtgctcccgggatgtgccctgacatggttaatttataacaccccgatttcctcttgggtcccctcaagcagacggggctcaagggggttacatttaataaaaggatgaagatggatagaaaaaaaaa
